(19) United States
(12) Patent Application Publication
(10) Pub. No.: US 2015/0232520 A1
(43) Pub. Date: Aug. 20, 2015

(54) Charged Nutritive Fragments, Proteins and Methods

(71) Applicant: Pronutria, Inc., Cambridge, MA (US)

(72) Inventors: Michael J. Hamill, Wellesley, MA (US); Nathaniel W. Silver, Cambridge, MA (US); Rajeev Chillakuru, Cambridge, MA (US); John F. Kramarczyk, Somverville, MA (US); David Arthur Berry, Brookline, MA (US); Brett Adam Boghigian, Boston, MA (US); Geoffrey von Maltzahn, Boston, MA (US)

(21) Appl. No.: 14/387,677

(22) PCT Filed: Mar. 15, 2013
(86) PCT No.: PCT/US2013/032225

§ 371 Date: Sep. 24, 2014

Related U.S. Application Data
(60) Provisional application No. 61/615,823, filed on Mar. 26, 2012.

(51) Int. Cl. C07K 14/47; C07K 14/415; C07K 14/375

(52) U.S. Cl. CPC C07K 14/47; C07K 14/375; C07K 14/415; A61K 38/00

(57) ABSTRACT

Charged nutritive proteins provided. In some embodiments the nutritive proteins an aqueous solubility of at least 12.5 g/L at pH 7. In some embodiments the nutritive proteins an aqueous solubility of at least 50 g/L at pH 7. In some embodiments the nutritive proteins an aqueous solubility of at least 100 g/L at pH 7. In some embodiments the nutritive proteins comprise at least one of a level of a) a ratio of branch chain amino acid residues to total amino acid residues present in the nutritive protein equal to or greater than the ratio of branch chain amino acid residues to total amino acid residues present in a benchmark protein; b) a ratio of leucine residues to total amino acid residues present in the nutritive protein equal to or greater than the ratio of leucine residues to total amino acid residues present in a benchmark protein; and c) a ratio of essential amino acid residues to total amino acid residues present in the nutritive protein equal to or greater than the ratio of essential amino acid residues to total amino acid residues present in a benchmark protein. Also provided are nucleic acids encoding the proteins, recombinant microorganisms that make the proteins, methods of making the proteins using recombinant microorganisms, compositions that comprise the proteins, and methods of using the proteins, among other things.

### REFERENCE TO RELATED APPLICATION

[0001] This application claims priority to U.S. Provisional Patent Application No. 61/615,823, filed Mar. 26, 2012, which is hereby incorporated herein by reference in its entirety.

### SEQUENCE LISTING

[0002] The instant application contains a Sequence Listing which has been submitted in ASCII format via EFS-Web and is hereby incorporated by reference in its entirety. Said ASCII copy, created on Mar. 12, 2013, is named 1005.006-PCT SL.txt and is 1,171,595 bytes in size.

### INTRODUCTION

[0003] Dietary protein is an essential nutrient for human health and growth. The World Health Organization recommends that dietary protein should contribute approximately 10 to 15% of energy intake when in energy balance and weight stable. Average daily protein intakes in various countries indicate that these recommendations are consistent with the amount of protein being consumed worldwide. Meals with an average of 20 to 30% of energy from protein are representative of high-protein diets when consumed in energy balance.

[0004] The body cannot synthesize certain amino acids that are necessary for health and growth, and instead must obtain them from food. These amino acids, called “essential amino acids”, are Histidine (H), Isoleucine (I), Leucine (L), Lysine (K), Methionine (M), Phenylalanine (F), Threonine (T), Tryptophan (W), and Valine (V). Dietary proteins that provide all the essential amino acids are referred to as “high quality” proteins. Animal foods such as meat, fish, poultry, eggs, and dairy products are generally regarded as high quality protein sources that provide a good balance of essential amino acids. Casein (a protein commonly found in mammalian milk, making up 80% of the proteins in cow milk) and whey (the protein in the liquid that remains after milk has been curdled and strained) are major sources of high quality dietary protein. Foods that do not provide a good balance of essential amino acids are referred to as “low quality” proteins. Most fruits and vegetables are poor sources of protein. Some plants foods including beans, peas, lentils, nuts and grains (such as wheat) are better sources of protein. Soy, a vegetable protein manufactured from soybeans, is considered by some to be a high quality protein.

[0005] Studies of the acute effects of consuming high amounts of protein in humans have shown that inclusion and in some cases increasing protein content in the diet can have beneficial effects. For example, studies have shown that ingestion of protein can induce postprandial satiety (including by suppressing hunger), induce thermogenesis and reduce glycemic response in human subjects.

[0006] Studies of high protein diets for weight loss have shown that protein positively affects energy expenditure and lean body mass. Further studies have shown that overeating produces significantly less weight gain in diets containing at least 5% of energy from protein, and that a high-protein diet decreases energy intake.

[0007] Clinical studies provide evidence that protein prevents muscle loss due to aging or bed rest. In particular, studies have shown that protein supplementation increases muscle fractional synthetic rate (FSR) during prolonged bed rest, maintains leg mass and strength during prolonged bed rest increases lean body mass, improves functional measures of gait and balance, and may serve as a viable intervention for individuals at risk of sarcopenia due to immobility or prolonged bed rest.

[0008] Studies on increasing muscle protein anabolism in athletes have shown that protein provided following exercise promotes muscle hypertrophy to a greater extent than that achieved by exercise alone. It has also been shown that protein provided following exercise supports protein synthesis without any increase in protein breakdown, resulting in a net positive protein balance and muscle mass accretion. While muscle protein synthesis appears to respond in a dose-response fashion to essential amino acid supplementation, not all proteins are equal in building muscle. For example, milk proteins appear to be superior to soy in supporting muscle mass accretion with resistance training, while both are superior to carbohydrate alone. The amino acid leucine is an important factor in stimulating muscle protein synthesis.

[0009] Whole proteins commonly found in foods do not necessarily provide an amino acid composition that meets the amino acid requirements of a mammal, such as a human, in an efficient manner. The result is that, in order to attain the minimal requirements of each essential amino acid, a larger amount of total protein must be consumed in the diet than would be required if the quality of the dietary protein were higher. By increasing the quality of the protein in the diet it is possible to reduce the total amount of protein that must be consumed compared to diets that include lower quality proteins.

[0010] In general, proteins that have higher protein quality are considered more beneficial in a mammalian diet than other proteins that do not. Such proteins are useful, for example, as components of a mammalian diet. Under certain circumstances such proteins promote maintenance of muscle mass, a healthy body mass index, and glycemic balance, among other things. Accordingly, there is a need for sources of proteins that have high protein quality.

[0011] Traditionally, desirable mixtures of amino acids, such as mixtures comprising essential amino acids, have been provided by hydrolyzing a protein with relatively high levels of essential amino acids, such as whey protein, and/or by combining free amino acids in a mixture that optionally also includes a hydrolyzed protein such as whey. Mixtures of this type may have a bitter taste and may be deemed unsuitable or undesirable for certain uses. As a result, such mixtures sometimes include flavoring agents to mask the taste of the free amino acids and/or hydrolyzed protein. In some cases compositions in which a proportion of the amino acid content is provided by polypeptides or proteins are found to have a better taste than compositions with a high proportion of total amino acids provided as free amino acids and/or certain hydrolyzed proteins. The availability of such compositions has been limited, however, because nutritional formulations have traditionally been made from protein isolated from natural food products, such as whey isolated from milk, or soy protein isolated from soy. The amino acid profiles of those proteins do not necessarily meet the amino acid requirements for a mammal. In addition, commodity proteins typically consist of mixtures of proteins and/or protein hydrolysates which can vary in their protein composition, thus leading to unpredictability regarding their nutritional value. Moreover, the limited number of sources of such high quality proteins has meant that only certain combinations of amino acids are available on a large scale for ingestion in protein form.

[0012] The agricultural methods required to supply high quality animal protein sources such as casein and whey, eggs, and meat, as well as plant proteins such as soy, also require significant energy inputs and have potentially deleterious environmental impacts. Accordingly, it would be useful in certain situations to have alternative sources and methods of supplying proteins for mammalian consumption.

[0013] In theory, synthetic polypeptide sequences comprising a desired mixture of amino acids could be designed and produced in a laboratory setting. This approach may raise various concerns, however, and is therefore not always applicable. First, skilled artisans are aware that obtaining high levels of production of such synthetic sequences may be very challenging. Second, even if such a synthetic protein were synthesized, its suitability for use in a nutritive product would be uncertain. For example, such a non-naturally occurring polypeptide could be an allergen or a toxin. Accordingly, in some embodiments this disclosure provides natural protein or polypeptide sequences, or variants thereof.

[0014] One feature that can enhance the utility of a nutritive protein is its solubility. Nutritive proteins with higher solubility can exhibit desirable characteristics such as increased stability, resistance to aggregation, and desirable taste profiles. For example, a nutritive protein that exhibits enhanced solubility can be formulated into a beverage or liquid formulation that includes a high concentration of nutritive protein in a relatively low volume of solution, thus delivering a large dose of protein nutrition per unit volume. A soluble nutritive protein can be useful in sports drinks or recovery drinks wherein a user (e.g., an athlete) wants to ingest nutritive protein before, during or after physical activity. A nutritive protein that exhibits enhanced solubility can also be particularly useful in a clinical setting wherein a subject (e.g., a patient or an elderly person) is in need of protein nutrition but is unable to consume solid foods or large volumes of liquids.

[0015] This disclosure provides proteins composed of useful combinations of amino acids that do not rely solely on traditional agriculture for production. For example, the inventors have discovered and this disclosure provides naturally occurring polypeptide sequences composed of combinations of amino acids that contain a useful level of at least one of a ratio of branch chain amino acids to total amino acids, a ratio of the amino acid leucine to total amino acids, and a ratio essential amino acids to total amino acids. This disclosure also provides nutritive proteins comprising the polypeptide sequences. In some embodiments the nutritive proteins comprise at least one of a ratio of branch chain amino acid residues to total amino acid residues of at least 24%; a ratio of Leu residues to total amino acid residues of at least 11%; and a ratio of essential amino acid residues to total amino acid residues of at least 49%.

[0016] This disclosure also provides nucleic acids encoding the proteins, recombinant microorganisms that make the proteins, methods of making the proteins using recombinant microorganisms, compositions that comprise the proteins, and methods of using the proteins, among other things.

### SUMMARY

[0017] In a first aspect this disclosure provides isolated nutritive proteins comprising a first polypeptide sequence that is homologous to a fragment of a naturally occurring nutritive protein, wherein the first polypeptide sequence has an aqueous solubility of at least 12.5 g/l at pH 7. In some embodiments the first polypeptide sequence has an aqueous solubility of at least 50 g/L at pH 7. In some embodiments the first polypeptide sequence has an aqueous solubility of at least 100 g/L at pH 7. In some embodiments the first polypeptide sequence comprises: a. a ratio of branch chain amino acid residues to total amino acid residues of at least 8%; b. a ratio of Leu residues to total amino acid residues of at least 4%; and c. a ratio of essential amino acid residues to total amino acid residues of at least 19%. In some embodiments the first polypeptide sequence further comprises at least one of each essential amino acid. In some embodiments the first polypeptide sequence comprises at least one of: a. a ratio of branch chain amino acid residues to total amino acid residues of at least 24%; b. a ratio of Leu residues to total amino acid residues of at least 11%; and c. a ratio of essential amino acid residues to total amino acid residues of at least 49%.

[0018] In some embodiments the first polypeptide sequence comprises at least 70% homology to at least 50 amino acids of a naturally occurring nutritive protein. In some embodiments the first polypeptide sequence comprises at least 95% homology to at least 50 amino acids of a naturally occurring nutritive protein. In some embodiments the first polypeptide sequence comprises at least 70% homology to a fragment of a naturally occurring nutritive protein. In some embodiments the first polypeptide sequence comprises at least 95% homology to a fragment of a naturally occurring nutritive protein. In some embodiments the first polypeptide sequence consists of a fragment of a naturally occurring nutritive protein.

[0019] In some embodiments the first polypeptide sequence is not an allergen. In some embodiments the first polypeptide sequence has less than 50% global homology to a known allergen.

[0020] In some embodiments the first polypeptide sequence is not a toxin. In some embodiments the first polypeptide sequence has less than 50% global homology to a known toxin.

[0021] In some embodiments the first polypeptide sequence has a simulated gastric digestion half-life of less than 60 minutes. In some embodiments the first polypeptide sequence has a simulated gastric digestion half-life of less than 30 minutes. In some embodiments the first polypeptide sequence has a simulated gastric digestion half-life of less than 10 minutes In some embodiments the first polypeptide sequence is completely digested in simulated gastric fluid. In some embodiments the first polypeptide sequence comprises at least one protease recognition site selected from a pepsin recognition site, a trypsin recognition site, and a chymotrypsin recognition site. In some embodiments the first polypeptide sequence comprises no cysteine residues. In some embodiments the first polypeptide sequence comprises no disulfide bonds. In some embodiments the first polypeptide sequence does not comprise N-linked glycosylation. In some embodiments the first polypeptide sequence does not comprise O-linked glycosylation.

[0022] In some embodiments the first polypeptide sequence is resistant to aggregation. In some embodiments the first polypeptide sequence is anionic at pH 7. In some embodiments the first polypeptide sequence has a calculated solvation score of −20 or less. In some embodiments the first polypeptide sequence has a calculated solvation score of −30 or less. In some embodiments the first polypeptide sequence has a calculated aggregation score of 0.75 or less. In some embodiments the first polypeptide sequence has a calculated aggregation score of 0.5 or less. In some embodiments the first polypeptide sequence has a calculated aggregation score of 0.3 or less.

[0023] In some embodiments the first polypeptide sequence comprises an amino acid sequence selected from: i. an amino acid sequence selected from SEQ ID NO: 1 to SEQ ID NO: 1052, ii. a modified derivative of an amino acid sequence selected from SEQ ID NO: 1 to SEQ ID NO: 1052, and iii. a mutein of an amino acid sequence selected from SEQ ID NO: 1 to SEQ ID NO: 1052. In some embodiments the first polypeptide sequence consists of an amino acid sequence selected from: i. an amino acid sequence selected from SEQ ID NO: 1 to SEQ ID NO: 1052, ii. a modified derivative of an amino acid sequence selected from SEQ ID NO: 1 to SEQ ID NO: 1052, and iii. a mutein of an amino acid sequence selected from SEQ ID NO: 1 to SEQ ID NO: 1052. In some embodiments the first polypeptide sequence is at least 40%, 45%, 50%, 55%, 60%, 65%, 70%, 75%, 80%, 85%, 86%, 87%, 88%, 89%, 90%, 91%, 92%, 93%, 94%, 95%, 96%, 97%, 98%, 99%, or 99.5% homologous to at least one reference amino acid sequence selected from SEQ ID NO: 1 to SEQ ID NO: 1052.

[0024] In another aspect this disclosure provides isolated nutritive proteins comprising a first polypeptide sequence that is homologous to a fragment of a naturally occurring nutritive protein, wherein the isolated nutritive protein has an aqueous solubility of at least 12.5 g/L at pH 7. In some embodiments the isolated nutritive protein has an aqueous solubility of at least 50 g/L at pH 7. In some embodiments the isolated nutritive protein has an aqueous solubility of at least 100 g/L at pH 7. In some embodiments the isolated nutritive protein comprises: a. a ratio of branch chain amino acid residues to total amino acid residues of at least 8%; b. a ratio of Leu residues to total amino acid residues of at least 4%; and c. a ratio of essential amino acid residues to total amino acid residues of at least 19%. In some embodiments the isolated nutritive protein further comprises at least one of each essential amino acid. In some embodiments the isolated nutritive protein comprises at least one of: a. a ratio of branch chain amino acid residues to total amino acid residues of at least 24%; b. a ratio of Leu residues to total amino acid residues of at least 11%; and c. a ratio of essential amino acid residues to total amino acid residues of at least 49%.

[0025] In some embodiments the isolated nutritive protein is not an allergen. In some embodiments the isolated nutritive protein has less than 50% global homology to a known allergen.

[0026] In some embodiments the isolated nutritive protein is not a toxin. In some embodiments the isolated nutritive protein has less than 50% global homology to a known toxin.

[0027] In some embodiments the isolated nutritive protein has a simulated gastric digestion half-life of less than 60 minutes. In some embodiments the isolated nutritive protein has a simulated gastric digestion half-life of less than 30 minutes. In some embodiments the isolated nutritive protein has a simulated gastric digestion half-life of less than 10 minutes. In some embodiments the isolated nutritive protein is completely digested in simulated gastric fluid. In some embodiments the isolated the nutritive protein comprises at least one protease recognition site selected from a pepsin recognition site, a trypsin recognition site, and a chymotrypsin recognition site. In some embodiments the isolated nutritive protein comprises no cysteine residues. In some embodiments the isolated nutritive protein comprises no disulfide bonds. In some embodiments the isolated nutritive protein does not comprise N-linked glycosylation. In some embodiments the isolated nutritive protein does not comprise O-linked glycosylation.

[0028] In some embodiments the isolated nutritive protein is resistant to aggregation. In some embodiments the isolated nutritive protein is anionic at pH 7. In some embodiments the isolated nutritive protein has a calculated solvation score of −20 or less. In some embodiments the isolated nutritive protein has a calculated solvation score of −30 or less. In some embodiments the isolated nutritive protein has a calculated aggregation score of 0.75 or less. In some embodiments the isolated nutritive protein has a calculated aggregation score of 0.5 or less. In some embodiments the isolated nutritive protein has a calculated aggregation score of 0.3 or less.

[0029] In some embodiments the isolated nutritive protein comprises an amino acid sequence selected from: i. an amino acid sequence selected from SEQ ID NO: 1 to SEQ ID NO: 1052, ii. a modified derivative of an amino acid sequence selected from SEQ ID NO: 1 to SEQ ID NO: 1052, and iii. a mutein of an amino acid sequence selected from SEQ ID NO: 1 to SEQ ID NO: 1052. In some embodiments the isolated nutritive protein consists of an amino acid sequence selected from: i. an amino acid sequence selected from SEQ ID NO: 1 to SEQ ID NO: 1052, ii. a modified derivative of an amino acid sequence selected from SEQ ID NO: 1 to SEQ ID NO: 1052, and iii. a mutein of an amino acid sequence selected from SEQ ID NO: 1 to SEQ ID NO: 1052. In some embodiments the isolated nutritive protein is at least 40%, 45%, 50%, 55%, 60%, 65%, 70%, 75%, 80%, 85%, 86%, 87%, 88%, 89%, 90%, 91%, 92%, 93%, 94%, 95%, 96%, 97%, 98%, 99%, or 99.5% homologous to at least one reference amino acid sequence selected from SEQ ID NO: 1 to SEQ ID NO: 1052. In some embodiments the isolated nutritive protein consists of the fragment of the naturally occurring nutritive protein.

[0030] In some embodiments of the isolated nutritive proteins of this disclosure, the isolated nutritive protein further comprises a polypeptide tag for affinity purification. In some embodiments the tag for affinity purification is a polyhistidine-tag.

[0031] In another aspect this disclosure provides isolated nucleic acids comprising a nucleic acid sequence that encodes a nutritive protein of this disclosure. In some embodiments the isolated nucleic acid is selected from genomic DNA, cDNA, sense RNA and antisense RNA. In some embodiments the isolated nucleic acid is genomic DNA. In some embodiments the isolated nucleic acid is cDNA. In some embodiments the isolated nucleic acid further comprises an expression control sequence operatively linked to the nucleic acid sequence that encodes the nutritive protein.

[0032] In another aspect this disclosure provides vectors comprising a nucleic acid sequence that encodes a nutritive protein of this disclosure. In some embodiments the vector further comprises an expression control sequence operatively linked to the nucleic acid sequence that encodes the nutritive protein.

[0033] In another aspect this disclosure provides recombinant microorganisms comprising at least one of a nucleic acid of this disclosure and a vector of this disclosure. In some embodiments the recombinant microorganism is a prokaryote. In some embodiments the prokaryote is heterotrophic. In some embodiments the prokaryote is autotrophic. In some embodiments the prokaryote is a bacteria.

[0034] In another aspect this disclosure provides methods of making a nutritive protein of any one of this disclosure, the methods comprising culturing a recombinant microorganism of this disclosure under conditions sufficient for production of the nutritive protein by the recombinant microorganism. In some embodiments the methods further comprise isolating the nutritive protein from the culture.

[0035] In another aspect this disclosure provides nutritive compositions comprising an isolated nutritive protein of this disclosure and at least one second component. In some embodiments the at least one second component is selected from a protein, a polypeptide, a peptide, a free amino acid, a carbohydrate, a lipid, a mineral or mineral source, a vitamin, a supplement, an organism, a pharmaceutical, and an excipient. In some embodiments the at least one second component is a protein. In some embodiments the at least one second component is a nutritive protein. In some embodiments the at least one second component is a free amino acid selected from essential amino acids, non-essential amino acids, branch chain amino acids, non-standard amino acids and modified amino acids. In some embodiments the at least one second component is a free amino acid selected from essential amino acids. In some embodiments the at least one second component is a free amino acid selected from branch chain amino acids. In some embodiments the at least one second component is Leu. In some embodiments the at least one second component is a lipid. In some embodiments the lipid is selected from a fat, oil, triglyceride, cholesterol, phospholipid, and fatty acid. In some embodiments the at least one second component is selected from a mineral and a vitamin. In some embodiments the at least one second component is a supplement. In some embodiments the at least one second component is an organism. In some embodiments the at least one second component is a pharmaceutical. In some embodiments the at least one second component is an excipient. In some embodiments at least one excipient is selected from a buffering agent, a preservative, a stabilizer, a binder, a compaction agent, a lubricant, a dispersion enhancer, a disintegration agent, a flavoring agent, a sweetener, a coloring agent. In some embodiments the nutritive composition is formulated as a liquid solution, slurry, suspension, gel, paste, powder, or solid.

[0036] In another aspect this disclosure provides methods of making a nutritive composition of this disclosure, comprising providing a nutritive protein of this disclosure and combining the nutritive protein with the at least one second component.

[0037] In another aspect this disclosure provides methods of maintaining or increasing at least one of muscle mass, muscle strength, and functional performance in a subject, the method comprising providing to the subject a sufficient amount of a nutritive protein of this disclosure, a nutritive composition of this disclosure or a nutritive composition made by the method of this disclosure. In some embodiments the subject is at least one of elderly, critically-medically ill, and suffering from protein-energy malnutrition. In some embodiments the nutritive protein of this disclosure, a nutritive composition of this disclosure or a nutritive composition made by the method of this disclosure is consumed by the subject in coordination with performance of exercise. In some embodiments the nutritive protein of this disclosure, a nutritive composition of this disclosure or a nutritive composition made by the method of this disclosure is consumed by the subject by an oral, enteral, or parenteral route.

[0038] In another aspect this disclosure provides methods of maintaining or achieving a desirable body mass index in a subject, the methods comprising providing to the subject a sufficient amount of a nutritive protein of this disclosure, a nutritive composition of this disclosure or a nutritive composition made by the method of this disclosure. In some embodiments the subject is at least one of elderly, critically-medically ill, and suffering from protein-energy malnutrition. In some embodiments the nutritive protein of this disclosure, a nutritive composition of this disclosure or a nutritive composition made by the method of this disclosure is consumed by the subject in coordination with performance of exercise. In some embodiments the nutritive protein of this disclosure, a nutritive composition of this disclosure or a nutritive composition made by the method of this disclosure is consumed by the subject by an oral, enteral, or parenteral route.

[0039] In another aspect this disclosure provides methods of providing protein to a subject with protein-energy malnutrition, the methods comprising providing to the subject a sufficient amount of a nutritive protein of this disclosure, a nutritive composition of this disclosure or a nutritive composition made by the method of this disclosure. In some embodiments the nutritive protein of this disclosure, a nutritive composition of this disclosure or a nutritive composition made by the method of this disclosure is consumed by the subject in coordination with performance of exercise. In some embodiments the nutritive protein of this disclosure, a nutritive composition of this disclosure or a nutritive composition made by the method of this disclosure is consumed by the subject by an oral, enteral, or parenteral route.

[0040] In another aspect this disclosure provides methods of increasing thermogenesis in a subject, the method comprising providing to the subject a sufficient amount of a nutritive protein of this disclosure, a nutritive composition of this disclosure or a nutritive composition made by the method of this disclosure. In some embodiments the subject is obese. In some embodiments the nutritive protein of this disclosure, a nutritive composition of this disclosure or a nutritive composition made by the method of this disclosure is consumed by the subject in coordination with performance of exercise. In some embodiments the nutritive protein of this disclosure, a nutritive composition of this disclosure or a nutritive composition made by the method of this disclosure is consumed by the subject by an oral, enteral, or parenteral route.

[0041] In another aspect this disclosure provides methods of inducing at least one of a satiation response and a satiety response in a subject, the method comprising providing to the subject a sufficient amount of a nutritive protein of this disclosure, a nutritive composition of this disclosure or a nutritive composition made by the method of this disclosure. In some embodiments the subject is obese. In some embodiments the nutritive protein of this disclosure, a nutritive composition of this disclosure or a nutritive composition made by the method of this disclosure is consumed by the subject in coordination with performance of exercise. In some embodiments the nutritive protein of this disclosure, a nutritive composition of this disclosure or a nutritive composition made by the method of this disclosure is consumed by the subject by an oral, enteral, or parenteral route.

[0042] In another aspect this disclosure provides methods of treating at least one of cachexia, sarcopenia and frailty in a subject, the method comprising providing to the subject a sufficient amount of a nutritive protein of this disclosure, a nutritive composition of this disclosure or a nutritive composition made by the method of this disclosure. In some embodiments the nutritive protein of this disclosure, a nutritive composition of this disclosure or a nutritive composition made by the method of this disclosure is consumed by the subject in coordination with performance of exercise. In some embodiments the nutritive protein of this disclosure, a nutritive composition of this disclosure or a nutritive composition made by the method of this disclosure is consumed by the subject by an oral, enteral, or parenteral route.

### BRIEF DESCRIPTION OF THE DRAWINGS

[0043] FIG. 1 shows a two dimensional histogram indicating the relative likelihood (on a log scale) of a protein being expressed in an E. coli expression screen as a function of solvation score (y-axis) and aggregation score (x-axis).

[0044] FIG. 2 shows a two dimensional histogram indicating the relative likelihood (on a log scale) of a protein being solubly expressed in an E. coli expression screen as a function of solvation score (y-axis) and aggregation score (x-axis).

### DETAILED DESCRIPTION

[0045] Unless otherwise defined herein, scientific and technical terms used in connection with the present disclosure shall have the meanings that are commonly understood by those of ordinary skill in the art. Further, unless otherwise required by context, singular terms shall include the plural and plural terms shall include the singular. Generally, nomenclatures used in connection with, and techniques of, biochemistry, enzymology, molecular and cellular biology, microbiology, genetics and protein and nucleic acid chemistry and hybridization described herein are those well-known and commonly used in the art. Certain references and other documents cited herein are expressly incorporated herein by reference. Additionally, all UniProt/SwissProt records cited herein are hereby incorporated herein by reference. In case of conflict, the present specification, including definitions, will control. The materials, methods, and examples are illustrative only and not intended to be limiting.

[0046] The methods and techniques of the present disclosure are generally performed according to conventional methods well known in the art and as described in various general and more specific references that are cited and discussed throughout the present specification unless otherwise indicated. See, e.g., Sambrook et al., Molecular Cloning: A Laboratory Manual, 3d ed., Cold Spring Harbor Laboratory Press, Cold Spring Harbor, N.Y. (2001); Ausubel et al., Current Protocols in Molecular Biology, Greene Publishing Associates (1992, and Supplements to 2002); Taylor and Drickamer, Introduction to Glycobiology, Oxford Univ. Press (2003); Worthington Enzyme Manual, Worthington Biochemical Corp., Freehold, N.J.; Handbook of Biochemistry: Section A Proteins, Vol I, CRC Press (1976); Handbook of Biochemistry: Section A Proteins, Vol II, CRC Press (1976); Essentials of Glycobiology, Cold Spring Harbor Laboratory Press (1999). Many molecular biology and genetic techniques applicable to cyanobacteria are described in Heidorn et al., “Synthetic Biology in Cyanobacteria: Engineering and Analyzing Novel Functions,” Methods in Enzymology, Vol. 497, Ch. 24 (2011), which is hereby incorporated herein by reference.

[0047] This disclosure refers to sequence database entries (e.g., UniProt/SwissProt records) for certain protein and gene sequences that are published on the internet, as well as other information on the internet. The skilled artisan understands that information on the internet, including sequence database entries, is updated from time to time and that, for example, the reference number used to refer to a particular sequence can change. Where reference is made to a public database of sequence information or other information on the internet, it is understood that such changes can occur and particular embodiments of information on the internet can come and go. Because the skilled artisan can find equivalent information by searching on the internet, a reference to an internet web page address or a sequence database entry evidences the availability and public dissemination of the information in question.

[0048] Before the present proteins, compositions, methods, and other embodiments are disclosed and described, it is to be understood that the terminology used herein is for the purpose of describing particular embodiments only and is not intended to be limiting. It must be noted that, as used in the specification and the appended claims, the singular forms “a,” “an” and “the” include plural referents unless the context clearly dictates otherwise.

[0049] The term “comprising” as used herein is synonymous with “including” or “containing”, and is inclusive or open-ended and does not exclude additional, unrecited members, elements or method steps.

[0050] This disclosure makes reference to amino acids. The full name of the amino acids is used interchangeably with the standard three letter and one letter abbreviations for each. For the avoidance of doubt, those are: Alanine (Ala, A), Arginine (Arg, R), Asparagine (Asn, N), Aspartic acid (Asp, D), Cysteine (Cys, C), Glutamic Acid (Glu, E), Glutamine (Gln, Q), Glycine (Gly, G), Histidine (His, H), Isoleucine (Ile, I), Leucine (Leu, L), Lysine (Lys, K), Methionine (Met, M), Phenylalanine (Phe, F), Proline (Pro, P), Serine (Ser, S), Threonine (Thr, T), Tryptophan (Trp, W), Tyrosine (Tyr, Y), Valine (Val, V).

[0051] As used herein, the term “in vitro” refers to events that occur in an artificial environment, e.g., in a test tube or reaction vessel, in cell culture, in a Petri dish, etc., rather than within an organism (e.g., animal, plant, or microbe).

[0052] As used herein, the term “in vivo” refers to events that occur within an organism (e.g., animal, plant, or microbe).

[0053] As used herein, the term “isolated” refers to a substance or entity that has been (1) separated from at least some of the components with which it was associated when initially produced (whether in nature or in an experimental setting), and/or (2) produced, prepared, and/or manufactured by the hand of man. Isolated substances and/or entities may be separated from at least about 10%, about 20%, about 30%, about 40%, about 50%, about 60%, about 70%, about 80%, about 90%, or more of the other components with which they were initially associated. In some embodiments, isolated agents are more than about 80%, about 85%, about 90%, about 91%, about 92%, about 93%, about 94%, about 95%, about 96%, about 97%, about 98%, about 99%, or more than about 99% pure. As used herein, a substance is “pure” if it is substantially free of other components.

[0054] As used herein, a “branch chain amino acid” is an amino acid selected from Leucine, Isoleucine, and Valine.

[0055] As used herein, an “essential amino acid” is an amino acid selected from Histidine, Isoleucine, Leucine, Lysine, Methionine, Phenylalanine, Threonine, Tryptophan, and Valine.

[0056] The term “peptide” as used herein refers to a short polypeptide, e.g., one that typically contains less than about 50 amino acids and more typically less than about 30 amino acids. The term as used herein encompasses analogs and mimetics that mimic structural and thus biological function.

[0057] The term “polypeptide” encompasses both naturally-occurring and non-naturally occurring proteins, and fragments, mutants, derivatives and analogs thereof. A polypeptide may be monomeric or polymeric. Further, a polypeptide may comprise a number of different domains each of which has one or more distinct activities. For the avoidance of doubt, a “polypeptide” may be any length greater two amino acids.

[0058] The term “isolated protein” or “isolated polypeptide” is a protein or polypeptide that by virtue of its origin or source of derivation (1) is not associated with naturally associated components that accompany it in its native state, (2) exists in a purity not found in nature, where purity can be adjudged with respect to the presence of other cellular material (e.g., is free of other proteins from the same species) (3) is expressed by a cell from a different species, or (4) does not occur in nature (e.g., it is a fragment of a polypeptide found in nature or it includes amino acid analogs or derivatives not found in nature or linkages other than standard peptide bonds). Thus, a polypeptide that is chemically synthesized or synthesized in a cellular system different from the cell from which it naturally originates will be “isolated” from its naturally associated components. A polypeptide or protein may also be rendered substantially free of naturally associated components by isolation, using protein purification techniques well known in the art. As thus defined, “isolated” does not necessarily require that the protein, polypeptide, peptide or oligopeptide so described has been physically removed from a cell in which it was synthesized.

[0059] The term “polypeptide fragment” as used herein refers to a polypeptide that has a deletion, e.g., an amino-terminal and/or carboxy-terminal deletion compared to a full-length polypeptide, such as a naturally occurring protein. In an embodiment, the polypeptide fragment is a contiguous sequence in which the amino acid sequence of the fragment is identical to the corresponding positions in the naturally-occurring sequence. Fragments typically are at least 5, 6, 7, 8, 9 or 10 amino acids long, or at least 12, 14, 16 or 18 amino acids long, or at least 20 amino acids long, or at least 25, 30, 35, 40 or 45, amino acids, or at least 50 or 60 amino acids long, or at least 70 amino acids long, or at least 100 amino acids long.

[0060] The term “fusion protein” refers to a polypeptide comprising a polypeptide or fragment coupled to heterologous amino acid sequences. Fusion proteins are useful because they can be constructed to contain two or more desired functional elements that can be from two or more different proteins. A fusion protein comprises at least 10 contiguous amino acids from a polypeptide of interest, or at least 20 or 30 amino acids, or at least 40, 50 or 60 amino acids, or at least 75, 100 or 125 amino acids. The heterologous polypeptide included within the fusion protein is usually at least 6 amino acids in length, or at least 8 amino acids in length, or at least 15, 20, or 25 amino acids in length. Fusions that include larger polypeptides, such as an IgG Fc region, and even entire proteins, such as the green fluorescent protein (“GFP”) chromophore-containing proteins, have particular utility. Fusion proteins can be produced recombinantly by constructing a nucleic acid sequence which encodes the polypeptide or a fragment thereof in frame with a nucleic acid sequence encoding a different protein or peptide and then expressing the fusion protein. Alternatively, a fusion protein can be produced chemically by crosslinking the polypeptide or a fragment thereof to another protein.

[0061] As used herein, a protein has “homology” or is “homologous” to a second protein if the nucleic acid sequence that encodes the protein has a similar sequence to the nucleic acid sequence that encodes the second protein. Alternatively, a protein has homology to a second protein if the two proteins have similar amino acid sequences. (Thus, the term “homologous proteins” is defined to mean that the two proteins have similar amino acid sequences.) As used herein, homology between two regions of amino acid sequence (especially with respect to predicted structural similarities) is interpreted as implying similarity in function.

[0062] When “homologous” is used in reference to proteins or peptides, it is recognized that residue positions that are not identical often differ by conservative amino acid substitutions. A “conservative amino acid substitution” is one in which an amino acid residue is substituted by another amino acid residue having a side chain (R group) with similar chemical properties (e.g., charge or hydrophobicity). In general, a conservative amino acid substitution will not substantially change the functional properties of a protein. In cases where two or more amino acid sequences differ from each other by conservative substitutions, the percent sequence identity or degree of homology may be adjusted upwards to correct for the conservative nature of the substitution. Means for making this adjustment are well known to those of skill in the art. See, e.g., Pearson, 1994, Methods Mol. Biol. 24:307-31 and 25:365-89.

[0063] The following six groups each contain amino acids that are conservative substitutions for one another: 1) Serine, Threonine; 2) Aspartic Acid, Glutamic Acid; 3) Asparagine, Glutamine; 4) Arginine, Lysine; 5) Isoleucine, Leucine, Methionine, Alanine, Valine, and 6) Phenylalanine, Tyrosine, Tryptophan.

[0064] Sequence homology for polypeptides, which is also referred to as percent sequence identity, is typically measured using sequence analysis software. See, e.g., the Sequence Analysis Software Package of the Genetics Computer Group (GCG), University of Wisconsin Biotechnology Center, 910 University Avenue, Madison, Wis. 53705. Protein analysis software matches similar sequences using a measure of homology assigned to various substitutions, deletions and other modifications, including conservative amino acid substitutions. For instance, GCG contains programs such as “Gap” and “Bestfit” which can be used with default parameters to determine sequence homology or sequence identity between closely related polypeptides, such as homologous polypeptides from different species of organisms or between a wild-type protein and a mutein thereof. See, e.g., GCG Version 6.1.

[0065] An exemplary algorithm when comparing a particular polypeptide sequence to a database containing a large number of sequences from different organisms is the computer program BLAST (Altschul et al., J. Mol. Biol. 215:403-410 (1990); Gish and States, Nature Genet. 3:266-272 (1993); Madden et al., Meth. Enzymol. 266:131-141 (1996); Altschul et al., Nucleic Acids Res. 25:3389-3402 (1997); Zhang and Madden, Genome Res. 7:649-656 (1997)), especially blastp or tblastn (Altschul et al., Nucleic Acids Res. 25:3389-3402 (1997)).

[0066] Exemplary parameters for BLASTp are: Expectation value: 10 (default); Filter: seg (default); Cost to open a gap: 11 (default); Cost to extend a gap: 1 (default); Max. alignments: 100 (default); Word size: 11 (default); No. of descriptions: 100 (default); Penalty Matrix: BLOWSUM62. The length of polypeptide sequences compared for homology will generally be at least about 16 amino acid residues, or at least about 20 residues, or at least about 24 residues, or at least about 28 residues, or more than about 35 residues. When searching a database containing sequences from a large number of different organisms, it may be useful to compare amino acid sequences. Database searching using amino acid sequences can be measured by algorithms other than blastp known in the art. For instance, polypeptide sequences can be compared using FASTA, a program in GCG Version 6.1. FASTA provides alignments and percent sequence identity of the regions of the best overlap between the query and search sequences. Pearson, Methods Enzymol. 183:63-98 (1990). For example, percent sequence identity between amino acid sequences can be determined using FASTA with its default parameters (a word size of 2 and the PAM250 scoring matrix), as provided in GCG Version 6.1, herein incorporated by reference.

[0067] In some embodiments, polymeric molecules (e.g., a polypeptide sequence or nucleic acid sequence) are considered to be “homologous” to one another if their sequences are at least 25%, at least 30%, at least 35%, at least 40%, at least 45%, at least 50%, at least 55%, at least 60%, at least 65%, at least 70%, at least 75%, at least 80%, at least 85%, at least 90%, at least 95%, or at least 99% identical. In some embodiments, polymeric molecules are considered to be “homologous” to one another if their sequences are at least 25%, at least 30%, at least 35%, at least 40%, at least 45%, at least 50%, at least 55%, at least 60%, at least 65%, at least 70%, at least 75%, at least 80%, at least 85%, at least 90%, at least 95%, or at least 99% similar. The term “homologous” necessarily refers to a comparison between at least two sequences (nucleotides sequences or amino acid sequences). In some embodiments, two nucleotide sequences are considered to be homologous if the polypeptides they encode are at least about 50% identical, at least about 60% identical, at least about 70% identical, at least about 80% identical, or at least about 90% identical for at least one stretch of at least about 20 amino acids. In some embodiments, homologous nucleotide sequences are characterized by the ability to encode a stretch of at least 4-5 uniquely specified amino acids. Both the identity and the approximate spacing of these amino acids relative to one another must be considered for nucleotide sequences to be considered homologous. In some embodiments of nucleotide sequences less than 60 nucleotides in length, homology is determined by the ability to encode a stretch of at least 4-5 uniquely specified amino acids. In some embodiments, two protein sequences are considered to be homologous if the proteins are at least about 50% identical, at least about 60% identical, at least about 70% identical, at least about 80% identical, or at least about 90% identical for at least one stretch of at least about 20 amino acids.

[0068] As used herein, a “modified derivative” refers to polypeptides or fragments thereof that are substantially homologous in primary structural sequence to a reference polypeptide sequence but which include, e.g., in vivo or in vitro chemical and biochemical modifications or which incorporate amino acids that are not found in the reference polypeptide. Such modifications include, for example, acetylation, carboxylation, phosphorylation, glycosylation, ubiquitination, labeling, e.g., with radionuclides, and various enzymatic modifications, as will be readily appreciated by those skilled in the art. A variety of methods for labeling polypeptides and of substituents or labels useful for such purposes are well known in the art, and include radioactive isotopes such as ¹²⁵I, ³²P, ³⁵S, and ³H, ligands that bind to labeled antiligands (e.g., antibodies), fluorophores, chemiluminescent agents, enzymes, and antiligands that can serve as specific binding pair members for a labeled ligand. The choice of label depends on the sensitivity required, ease of conjugation with the primer, stability requirements, and available instrumentation. Methods for labeling polypeptides are well known in the art. See, e.g., Ausubel et al., Current Protocols in Molecular Biology, Greene Publishing Associates (1992, and Supplements to 2002).

[0069] As used herein, “polypeptide mutant” or “mutein” refers to a polypeptide whose sequence contains an insertion, duplication, deletion, rearrangement or substitution of one or more amino acids compared to the amino acid sequence of a reference protein or polypeptide, such as a native or wild-type protein. A mutein may have one or more amino acid point substitutions, in which a single amino acid at a position has been changed to another amino acid, one or more insertions and/or deletions, in which one or more amino acids are inserted or deleted, respectively, in the sequence of the reference protein, and/or truncations of the amino acid sequence at either or both the amino or carboxy termini. A mutein may have the same or a different biological activity compared to the reference protein.

[0070] In some embodiments, a mutein has, for example, at least 85% overall sequence homology to its counterpart reference protein. In some embodiments, a mutein has at least 90% overall sequence homology to the wild-type protein. In other embodiments, a mutein exhibits at least 95% sequence identity, or 98%, or 99%, or 99.5% or 99.9% overall sequence identity.

[0071] As used herein, a “polypeptide tag for affinity purification” is any polypeptide that has a binding partner that can be used to isolate or purify a second protein or polypeptide sequence of interest fused to the first “tag” polypeptide. Several examples are well known in the art and include a His-6 tag, a FLAG epitope, a c-myc epitope, a Strep-TAGII, a biotin tag, a glutathione 5-transferase (GST), a chitin binding protein (CBP), a maltose binding protein (MBP), or a metal affinity tag.

[0072] As used herein, “recombinant” refers to a biomolecule, e.g., a gene or protein, that (1) has been removed from its naturally occurring environment, (2) is not associated with all or a portion of a polynucleotide in which the gene is found in nature, (3) is operatively linked to a polynucleotide which it is not linked to in nature, or (4) does not occur in nature. The term “recombinant” can be used in reference to cloned DNA isolates, chemically synthesized polynucleotide analogs, or polynucleotide analogs that are biologically synthesized by heterologous systems, as well as proteins and/or mRNAs encoded by such nucleic acids. Thus, for example, a protein synthesized by a microorganism is recombinant, for example, if it is synthesized from an mRNA synthesized from a recombinant gene present in the cell.

[0073] The term “polynucleotide”, “nucleic acid molecule”, “nucleic acid”, or “nucleic acid sequence” refers to a polymeric form of nucleotides of at least 10 bases in length. The term includes DNA molecules (e.g., cDNA or genomic or synthetic DNA) and RNA molecules (e.g., mRNA or synthetic RNA), as well as analogs of DNA or RNA containing non-natural nucleotide analogs, non-native internucleoside bonds, or both. The nucleic acid can be in any topological conformation. For instance, the nucleic acid can be single-stranded, double-stranded, triple-stranded, quadruplexed, partially double-stranded, branched, hairpinned, circular, or in a padlocked conformation. The nucleic acid (also referred to as polynucleotides) may include both sense and antisense strands of RNA, cDNA, genomic DNA, and synthetic forms and mixed polymers of the above. They may be modified chemically or biochemically or may contain non-natural or derivatized nucleotide bases, as will be readily appreciated by those of skill in the art. Such modifications include, for example, labels, methylation, substitution of one or more of the naturally occurring nucleotides with an analog, internucleotide modifications such as uncharged linkages (e.g., methyl phosphonates, phosphotriesters, phosphoramidates, carbamates, etc.), charged linkages (e.g., phosphorothioates, phosphorodithioates, etc.), pendent moieties (e.g., polypeptides), intercalators (e.g., acridine, psoralen, etc.), chelators, alkylators, and modified linkages (e.g., alpha anomeric nucleic acids, etc.) Also included are synthetic molecules that mimic polynucleotides in their ability to bind to a designated sequence via hydrogen bonding and other chemical interactions. Such molecules are known in the art and include, for example, those in which peptide linkages substitute for phosphate linkages in the backbone of the molecule. Other modifications can include, for example, analogs in which the ribose ring contains a bridging moiety or other structure such as the modifications found in “locked” nucleic acids.

[0074] A “synthetic” RNA, DNA or a mixed polymer is one created outside of a cell, for example one synthesized chemically.

[0075] The term “nucleic acid fragment” as used herein refers to a nucleic acid sequence that has a deletion, e.g., a 5′-terminal or 3′-terminal deletion compared to a full-length reference nucleotide sequence. In an embodiment, the nucleic acid fragment is a contiguous sequence in which the nucleotide sequence of the fragment is identical to the corresponding positions in the naturally-occurring sequence. In some embodiments fragments are at least 10, 15, 20, or 25 nucleotides long, or at least 20, 30, 40, 50, 60, 70, 80, 90, 100, 110, 120, 130, 140, or 150 nucleotides long. In some embodiments a fragment of a nucleic acid sequence is a fragment of an open reading frame sequence. In some embodiments such a fragment encodes a polypeptide fragment (as defined herein) of the protein encoded by the open reading frame nucleotide sequence.

[0076] As used herein, an endogenous nucleic acid sequence in the genome of an organism (or the encoded protein product of that sequence) is deemed “recombinant” herein if a heterologous sequence is placed adjacent to the endogenous nucleic acid sequence, such that the expression of this endogenous nucleic acid sequence is altered. In this context, a heterologous sequence is a sequence that is not naturally adjacent to the endogenous nucleic acid sequence, whether or not the heterologous sequence is itself endogenous (originating from the same host cell or progeny thereof) or exogenous (originating from a different host cell or progeny thereof). By way of example, a promoter sequence can be substituted (e.g., by homologous recombination) for the native promoter of a gene in the genome of a host cell, such that this gene has an altered expression pattern. This gene would now become “recombinant” because it is separated from at least some of the sequences that naturally flank it.

[0077] A nucleic acid is also considered “recombinant” if it contains any modifications that do not naturally occur to the corresponding nucleic acid in a genome. For instance, an endogenous coding sequence is considered “recombinant” if it contains an insertion, deletion or a point mutation introduced artificially, e.g., by human intervention. A “recombinant nucleic acid” also includes a nucleic acid integrated into a host cell chromosome at a heterologous site and a nucleic acid construct present as an episome.

[0078] As used herein, the phrase “degenerate variant” of a reference nucleic acid sequence encompasses nucleic acid sequences that can be translated, according to the standard genetic code, to provide an amino acid sequence identical to that translated from the reference nucleic acid sequence. The term “degenerate oligonucleotide” or “degenerate primer” is used to signify an oligonucleotide capable of hybridizing with target nucleic acid sequences that are not necessarily identical in sequence but that are homologous to one another within one or more particular segments.

[0079] The term “percent sequence identity” or “identical” in the context of nucleic acid sequences refers to the residues in the two sequences which are the same when aligned for maximum correspondence. The length of sequence identity comparison may be over a stretch of at least about nine nucleotides, usually at least about 20 nucleotides, more usually at least about 24 nucleotides, typically at least about 28 nucleotides, more typically at least about 32, and even more typically at least about 36 or more nucleotides. There are a number of different algorithms known in the art which can be used to measure nucleotide sequence identity. For instance, polynucleotide sequences can be compared using FASTA, Gap or Bestfit, which are programs in Wisconsin Package Version 10.0, Genetics Computer Group (GCG), Madison, Wis. FASTA provides alignments and percent sequence identity of the regions of the best overlap between the query and search sequences. Pearson, Methods Enzymol. 183:63-98 (1990). For instance, percent sequence identity between nucleic acid sequences can be determined using FASTA with its default parameters (a word size of 6 and the NOPAM factor for the scoring matrix) or using Gap with its default parameters as provided in GCG Version 6.1, herein incorporated by reference. Alternatively, sequences can be compared using the computer program, BLAST (Altschul et al., J. Mol. Biol. 215:403-410 (1990); Gish and States, Nature Genet. 3:266-272 (1993); Madden et al., Meth. Enzymol. 266:131-141 (1996); Altschul et al., Nucleic Acids Res. 25:3389-3402 (1997); Zhang and Madden, Genome Res. 7:649-656 (1997)), especially blastp or tblastn (Altschul et al., Nucleic Acids Res. 25:3389-3402 (1997)).

[0080] The term “substantial homology” or “substantial similarity,” when referring to a nucleic acid or fragment thereof, indicates that, when optimally aligned with appropriate nucleotide insertions or deletions with another nucleic acid (or its complementary strand), there is nucleotide sequence identity in at least about 76%, 80%, 85%, or at least about 90%, or at least about 95%, 96%, 97%, 98% or 99% of the nucleotide bases, as measured by any well-known algorithm of sequence identity, such as FASTA, BLAST or Gap, as discussed above.

[0081] Alternatively, substantial homology or similarity exists when a nucleic acid or fragment thereof hybridizes to another nucleic acid, to a strand of another nucleic acid, or to the complementary strand thereof, under stringent hybridization conditions. “Stringent hybridization conditions” and “stringent wash conditions” in the context of nucleic acid hybridization experiments depend upon a number of different physical parameters. Nucleic acid hybridization will be affected by such conditions as salt concentration, temperature, solvents, the base composition of the hybridizing species, length of the complementary regions, and the number of nucleotide base mismatches between the hybridizing nucleic acids, as will be readily appreciated by those skilled in the art. One having ordinary skill in the art knows how to vary these parameters to achieve a particular stringency of hybridization.

[0082] In general, “stringent hybridization” is performed at about 25° C. below the thermal melting point (Tm) for the specific DNA hybrid under a particular set of conditions. “Stringent washing” is performed at temperatures about 5° C. lower than the Tm for the specific DNA hybrid under a particular set of conditions. The Tm is the temperature at which 50% of the target sequence hybridizes to a perfectly matched probe. See Sambrook et al., Molecular Cloning: A Laboratory Manual, 2d ed., Cold Spring Harbor Laboratory Press, Cold Spring Harbor, N.Y. (1989), page 9.51. For purposes herein, “stringent conditions” are defined for solution phase hybridization as aqueous hybridization (i.e., free of formamide) in 6×SSC (where 20×SSC contains 3.0 M NaCl and 0.3 M sodium citrate), 1% SDS at 65° C. for 8-12 hours, followed by two washes in 0.2×SSC, 0.1% SDS at 65° C. for 20 minutes. It will be appreciated by the skilled worker that hybridization at 65° C. will occur at different rates depending on a number of factors including the length and percent identity of the sequences which are hybridizing.

[0083] As used herein, an “expression control sequence” refers to polynucleotide sequences which are necessary to affect the expression of coding sequences to which they are operatively linked. Expression control sequences are sequences which control the transcription, post-transcriptional events and translation of nucleic acid sequences. Expression control sequences include appropriate transcription initiation, termination, promoter and enhancer sequences; efficient RNA processing signals such as splicing and polyadenylation signals; sequences that stabilize cytoplasmic mRNA; sequences that enhance translation efficiency (e.g., ribosome binding sites); sequences that enhance protein stability; and when desired, sequences that enhance protein secretion. The nature of such control sequences differs depending upon the host organism; in prokaryotes, such control sequences generally include promoter, ribosomal binding site, and transcription termination sequence. The term “control sequences” is intended to encompass, at a minimum, any component whose presence is essential for expression, and can also encompass an additional component whose presence is advantageous, for example, leader sequences and fusion partner sequences.

[0084] As used herein, “operatively linked” or “operably linked” expression control sequences refers to a linkage in which the expression control sequence is contiguous with the gene of interest to control the gene of interest, as well as expression control sequences that act in trans or at a distance to control the gene of interest.

[0085] As used herein, a “vector” is intended to refer to a nucleic acid molecule capable of transporting another nucleic acid to which it has been linked. One type of vector is a “plasmid,” which generally refers to a circular double stranded DNA loop into which additional DNA segments may be ligated, but also includes linear double-stranded molecules such as those resulting from amplification by the polymerase chain reaction (PCR) or from treatment of a circular plasmid with a restriction enzyme. Other vectors include cosmids, bacterial artificial chromosomes (BAC) and yeast artificial chromosomes (YAC). Another type of vector is a viral vector, wherein additional DNA segments may be ligated into the viral genome (discussed in more detail below). Certain vectors are capable of autonomous replication in a host cell into which they are introduced (e.g., vectors having an origin of replication which functions in the host cell). Other vectors can be integrated into the genome of a host cell upon introduction into the host cell, and are thereby replicated along with the host genome. Moreover, certain vectors are capable of directing the expression of genes to which they are operatively linked. Such vectors are referred to herein as “recombinant expression vectors” (or simply “expression vectors”).

[0086] The term “recombinant host cell” (or simply “recombinant cell” or “host cell”), as used herein, is intended to refer to a cell into which a recombinant nucleic acid such as a recombinant vector has been introduced. In some instances the word “cell” is replaced by a name specifying a type of cell. For example, a “recombinant microorganism” is a recombinant host cell that is a microorganism host cell. It should be understood that such terms are intended to refer not only to the particular subject cell but to the progeny of such a cell. Because certain modifications may occur in succeeding generations due to either mutation or environmental influences, such progeny may not, in fact, be identical to the parent cell, but are still included within the scope of the term “recombinant host cell,” “recombinant cell,” and “host cell”, as used herein. A recombinant host cell may be an isolated cell or cell line grown in culture or may be a cell which resides in a living tissue or organism.

[0087] As used herein, the term “heterotrophic” refers to an organism that cannot fix carbon and uses organic carbon for growth.

[0088] As used herein, the term “autotrophic” refers to an organism that produces complex organic compounds (such as carbohydrates, fats, and proteins) from simple inorganic molecules using energy from light (by photosynthesis) or inorganic chemical reactions (chemosynthesis).

[0089] As used herein, “muscle mass” refers to the weight of muscle in a subject's body. Muscle mass includes the skeletal muscles, smooth muscles (such as cardiac and digestive muscles) and the water contained in these muscles. Muscle mass of specific muscles can be determined using dual energy x-ray absorptiometry (DEXA) (Padden-Jones et al., 2004). Total lean body mass (minus the fat), total body mass, and bone mineral content can be measured by DEXA as well. In some embodiments a change in the muscle mass of a specific muscle of a subject is determined, for example by DEXA, and the change is used as a proxy for the total change in muscle mass of the subject. Thus, for example, if a subject consumes a nutritive protein as disclosed herein and experiences an increase over a period of time in muscle mass in a particular muscle or muscle group, it can be concluded that the subject has experienced an increase in muscle mass.

[0090] As used herein, a “muscle strength” refers to the amount of force a muscle can produce with a single maximal effort. There are two types of muscle strength, static strength and dynamic strength. Static strength refers to isometric contraction of a muscle, where a muscle generates force while the muscle length remains constant and/or when there is no movement in a joint. Examples include holding or carrying an object, or pushing against a wall. Dynamic strength refers to a muscle generating force that results in movement. Dynamic strength can be isotonic contraction, where the muscle shortens under a constant load or isokinetic contraction, where the muscle contracts and shortens at a constant speed. Dynamic strength can also include isoinertial strength.

[0091] Unless specified, “muscle strength” refers to maximum dynamic muscle strength. Maximum strength is referred to as “one repetition maximum” (1RM). This is a measurement of the greatest load (in kilograms) that can be fully moved (lifted, pushed or pulled) once without failure or injury. This value can be measured directly, but doing so requires that the weight is increased until the subject fails to carry out the activity to completion. Alternatively, 1RM is estimated by counting the maximum number of exercise repetitions a subject can make using a load that is less than the maximum amount the subject can move. Leg extension and leg flexion are often measured in clinical trials (Borsheim et al., “Effect of amino acid supplementation on muscle mass, strength and physical function in elderly,” Clin Nutr 2008; 27:189-195; Paddon-Jones, et al., “Essential amino acid and carbohydrate supplementation ameliorates muscle protein loss in humans during 28 days bed rest,” J Clin Endocrinol Metab 2004; 89:4351-4358).

[0092] As used herein, “functional performance” refers to a functional test that simulates daily activities. “Functional performance” is measured by any suitable accepted test, including timed-step test (step up and down from a 4 inch bench as fast as possible 5 times), timed floor transfer test (go from a standing position to a supine position on the floor and thereafter up to a standing position again as fast as possible for one repetition), and physical performance battery test (static balance test, chair test, and a walking test) (Borsheim et al., “Effect of amino acid supplementation on muscle mass, strength and physical function in elderly,” Clin Nutr 2008; 27:189-195).

[0093] As used herein, a “body mass index” or “BMI” or “Quetelet index” is a subject's weight in kilograms divided by the square of the subject's height in meters (kg/m²).

[0094] For adults, a frequent use of the BMI is to assess how much an individual's body weight departs from what is normal or desirable for a person of his or her height. The weight excess or deficiency may, in part, be accounted for by body fat, although other factors such as muscularity also affect BMI significantly. The World Health Organization regards a BMI of less than 18.5 as underweight and may indicate malnutrition, an eating disorder, or other health problems, while a BMI greater than 25 is considered overweight and above 30 is considered obese. (World Health Organization. BMI classification. Accessed Mar. 19, 2012 http://apps.who.int/bmi/index.jsp?introPage=intro_{—}3. html.) As used herein a “desirable body mass index” is a body mass index of from about 18.5 to about 25. Thus, if a subject has a BMI below about 18.5, then an increase in the subject's BMI is an increase in the desirability of the subject's BMI. If instead a subject has a BMI above about 25, then a decrease in the subject's BMI is an increase in the desirability of the subject's BMI.

[0095] As used herein, an “elderly” mammal is one who experiences age related changes in at least one of body mass index and muscle mass (e.g., age related sarcopenia). In some embodiments an “elderly” human is at least 50 years old, at least 60 years old, at least 65 years old, at least 70 years old, at least 75 years old, at least 80 years old, at least 85 years old, at least 90 years old, at least 95 years old, or at least 100 years old. In some embodiments and an elderly animal, mammal, or human is a human who has experienced a loss of muscle mass from peak lifetime muscle mass of at least 5%, at least 10%, at least 15%, at least 20%, at least 25%, at least 30%, at least 35%, at least 40%, at least 45%, at least 50%, at least 55%, or at least 60%. Because age related changes to at least one of body mass index and muscle mass are known to correlate with increasing age, in some embodiments an elderly mammal is identified or defined simply on the basis of age. Thus, in some embodiments an “elderly” human is identified or defined simply by the fact that their age is at least 60 years old, at least 65 years old, at least 70 years old, at least 75 years old, at least 80 years old, at least 85 years old, at least 90 years old, at least 95 years old, or at least 100 years old, and without recourse to a measurement of at least one of body mass index and muscle mass.

[0096] As used herein, a patient is “critically-medically ill” if the patient, because of medical illness, experiences changes in at least one of body mass index and muscle mass (e.g., sarcopenia). In some embodiments the patient is confined to bed for at least 25%, at least 50%, at least 60%, at least 70%, at least 80%, at least 90%, at least 95%, or 100% of their waking time. In some embodiments the patient is unconscious. In some embodiments the patient has been confined to bed as described in this paragraph for at least 1 day, 2 days, 3 days, 4 days, 5 days, 10 days, 2 weeks, 3 weeks, 4 weeks, 5 weeks, 10 weeks or longer.

[0097] As used herein, “protein-energy malnutrition” refers to a form of malnutrition where there is inadequate protein intake. Types include Kwashiorkor (protein malnutrition predominant), Marasmus (deficiency in both calorie and protein nutrition), and Marasmic Kwashiorkor (marked protein deficiency and marked calorie insufficiency signs present, sometimes referred to as the most severe form of malnutrition).

[0098] As used herein, “cachexia” refers to a multifaceted clinical syndrome that results in wasting and weight loss. It is a complex condition where protein catabolism exceeds protein anabolism, which makes muscle wasting a primary feature of the condition. In addition to the metabolic derangements in protein metabolism, it is also characterized by anorexia and inflammation. These derangements plus impaired protein metabolism are responsive to nutrition therapy to varying degrees.

[0099] As used herein, “thermogenesis” is the process of heat production in a mammal. Thermogenesis is accompanied by an increase in energy expenditure. Thermogenesis is specifically the energy burned following the metabolism of a food component (such as protein). This may also be referred to as the thermic effect of food. Total energy expenditure by an individual equals the sum of resting energy expenditure (energy consumed at rest in a fasting state to support basal metabolism), the thermic effect of food, and energy expenditure related to physical activity. Resting energy expenditure accounts for about 65-75% of total energy expenditure in humans. The amount and activity of muscle mass is one influencer of resting energy expenditure. Adequate protein consumption to support muscle also influences resting energy expenditure. The ingestion of protein tends to increase energy expenditure following a meal; this is the thermic effect of food. The thermic effect of food accounts for about 10% of total energy expenditure in humans. While this is a small proportion of total energy expenditure, small increases in this value can impact body weight. Protein has a higher thermic effect than fat or carbohydrate; this effect along with other metabolic influences of protein make it a useful substrate for weight control, diabetes management and other conditions.

[0100] As used herein, “satiation” is the act of becoming full while eating or a reduced desire to eat. This halts or diminishes eating.

[0101] As used herein, “satiety” is the act of remaining full after a meal which manifests as the period of no eating follow the meal.

[0102] As used herein, “exercise” is, most broadly, any bodily activity that enhances or maintains physical fitness and overall health and wellness. Exercise is performed for various reasons including strengthening muscles and the cardiovascular system, honing athletic skills, weight loss or maintenance, as well as for the purpose of enjoyment.

[0103] As used herein, a “sufficient amount” is an amount of a protein or polypeptide disclosed herein that is sufficient to cause a desired effect. For example, if an increase in muscle mass is desired, a sufficient amount is an amount that causes an increase in muscle mass in a subject over a period of time. A sufficient amount of a protein or polypeptide fragment can be provided directly, i.e., by administering the protein or polypeptide fragment to a subject, or it can be provided as part of a composition comprising the protein or polypeptide fragment. Modes of administration are discussed elsewhere herein.

[0104] As used herein, the term “mammal” refers to any member of the taxonomic class mammalia, including placental mammals and marsupial mammals. Thus, “mammal” includes humans, primates, livestock, and laboratory mammals. Exemplary mammals include a rodent, a mouse, a rat, a rabbit, a dog, a cat, a sheep, a horse, a goat, a llama, cattle, a primate, a pig, and any other mammal. In some embodiments, the mammal is at least one of a transgenic mammal, a genetically-engineered mammal, and a cloned mammal.

### A. Nutritive Proteins

[0105] For the purposes of this disclosure, a “nutritive protein” is a protein that contains a desirable amount of essential amino acids. In some embodiments, the nutritive protein comprises at least 30% essential amino acids by weight. In some embodiments, the nutritive protein comprises at least 40% essential amino acids by weight. In some embodiments, the nutritive protein comprises at least 50% essential amino acids by weight. In some embodiments the nutritive protein comprises or consists of a protein or fragment of a protein that naturally occurs in an edible species. In its broadest sense, an “edible species” encompasses any species known to be eaten without deleterious effect by at least one type of mammal. A deleterious effect includes a poisonous effect and a toxic effect. In some embodiments an edible species is a species known to be eaten by humans without deleterious effect. Some edible species are an infrequent but known component of the diet of only a small group of a type of mammal in a limited geographic location while others are a dietary staple throughout much of the world. In other embodiments an edible species is one not known to be previously eaten by any mammal, but that is demonstrated to be edible upon testing. Edible species include but are not limited to Gossypium turneri, Pleurotus cornucopiae, Glycine max, Oryza sativa, Thunnus obesus, Abies bracteata, Acomys ignitus, Lathyrus aphaca, Bos gaurus, Raphicerus melanotis, Phoca groenlandica, Acipenser sinensis, Viverra tangalunga, Pleurotus sajor-caju, Fagopyrum tataricum, Pinus strobus, Ipomoea nil, Taxus cuspidata, Ipomoea wrightii, Mya arenaria, Actinidia deliciosa, Gazella granti, Populus tremula, Prunus domestica, Larus argentatus, Vicia villosa, Sargocentron punctatissimum, Silene latifolia, Lagenodelphis hosei, Spisula solidissima, Crossarchus obscurus, Phaseolus angularis, Lathyrus vestitus, Oncorhynchus gorbuscha, Alligator mississippiensis, Pinus halepensis, Larus canus, Brassica napus, Silene cucubalus, Phoca fasciata, Gazella bennettii, Pinus taeda, Taxus canadensis, Zamia furfuracea, Pinus yunnanensis, Pinus wallichiana, Asparagus officinalis, Capsicum baccatum, Pinus longaeva, Taxus baccata, Pinus sibirica, Citrus sinensis, Sargocentron xantherythrum, Bison bison, Gazella thomsonii, Vicia sativa, Branta canadensis, Apium graveolens, Acer campestre, Coriandrum sativum, Silene conica, Lactuca sativa, Capsicum chinense, Abies veitchii, Capra hircus, Gazella spekei, Oncorhynchus keta, Ipomoea obscura, Cucumis melo var. conomon, Phoca hispida, Vulpes vulpes, Ipomoea quamoclit, Solanum habrochaites, Populus sp., Pinus rigida, Quercus lyrata, Phaseolus coccineus, Larus ridibundus, Sargocentron spiniferum, Thunnus thynnus, Vulpes lagopus, Bos gaurus frontalis, Acer opalus, Acer palmatum, Quercus ilex, Pinus mugo, Grus antigone, Pinus uncinata, Prunus mume, Oncorhynchus tschawytscha, Gazella subgutturosa, Vulpes zerda, Pinus coulteri, Gossypium barbadense, Acer pseudoplatanus, Oncorhynchus nerka, Sus barbatus, Fagopyrum esculentum subsp. Ancestrale, Cynara cardunculus, Phaseolus aureus, Populus nigra, Gossypium schwendimanii, Solanum chacoense, Quercus rubra, Cucumis sativus, Equus burchelli, Oncorhynchus kisutch, Pinus radiata, Phoca vitulina richardsi, Grus nigricollis, Abies grandis, Oncorhynchus masou, Spinacia oleracea, Solanum chilense, Addax nasomaculatus, Ipomoea batatas, Equus grevyi, Abies sachalinensis, Pinus pinea, Hipposideros commersoni, Crocus nudiflorus, Citrus maxima, Acipenser transmontanus, Gossypium gossypioides, Viverra zibetha, Quercus cerris, Anser indicus, Pinus balfouriana, Silene otites, Oncorhynchus sp., Viverra megaspila, Bos mutus grunniens, Pinus elliottii, Equus hemionus kulan, Capra ibex ibex, Allium sativum, Raphanus sativus, Pinus echinata, Prunus serotina, Sargocentron diadema, Silene gallica, Brassica oleracea, Daucus carota, Oncorhynchus mykiss, Brassica oleracea var. alboglabra, Gossypium hirsutum, Abies alba, Citrus reticulata, Cichorium intybus, Bos sauveli, Lama glama, Zea mays, Acorus gramineus, Vulpes macrotis, Ovis ammon darwini, Raphicerus sharpei, Pinus contorta, Bos indicus, Capra sibirica, Pinus ponderosa, Prunus dulcis, Solanum sogarandinum, Ipomoea aquatica, Lagenorhynchus albirostris, Ovis canadensis, Prunus avium, Gazella dama, Thunnus alalunga, Silene pratensis, Pinus cembra, Crocus sativus, Citrullus lanatus, Gazella rufifrons, Brassica tournefortii, Capra falconeri, Bubalus mindorensis, Pinus palustris, Prunus laurocerasus, Grus vipio, Ipomoea purpurea, Pinus leiophylla, Lagenorhynchus obscurus, Raphicerus campestris, Brassica rapa subsp. Pekinensis, Acmella radicans, Ipomoea triloba, Pinus patula, Cucumis melo, Pinus virginiana, Solanum lycopersicum, Pinus dens flora, Pinus engelmannii, Quercus robur, Ipomoea setosa, Pleurotus djamor, Hipposideros diadema, Ovis aries, Sargocentron microstoma, Brassica oleracea var. italica, Capra cylindricornis, Populus kitakamiensis, Allium textile, Vicia faba, Fagopyrum esculentum, Bison priscus, Quercus suber, Lagophylla ramosissima, Acrantophis madagascariensis, Acipenser baerii, Capsicum annuum, Triticum aestivum, Xenopus laevis, Phoca sibirica, Acipenser naccarii, Actinidia chinensis, Ovis dalli, Solanum tuberosum, Bubalus carabanensis, Citrus jambhiri, Bison bonasus, Equus asinus, Bubalus depressicornis, Pleurotus eryngii, Solanum demissum, Ovis vignei, Zea mays subsp. Parviglumis, Lathyrus tingitanus, Welwitschia mirabilis, Grus rubicunda, Ipomoea coccinea, Allium cepa, Gazella soemmerringii, Brassica rapa, Lama vicugna, Solanum peruvianum, Xenopus borealis, Capra caucasica, Thunnus albacares, Equus zebra, Gallus gallus, Solanum bulbocastanum, Hipposideros terasensis, Lagenorhynchus acutus, Hippopotamus amphibius, Pinus koraiensis, Acer monspessulanum, Populus deltoides, Populus trichocarpa, Acipenser guldenstadti, Pinus thunbergii, Brassica oleracea var. capitata, Abyssocottus korotneffi, Gazella cuvieri, Abies homolepis, Abies holophylla, Gazella gazella, Pinus parviflora, Brassica oleracea var. acephala, Cucurbita pepo, Pinus armandii, Abies mariesii, Thunnus thynnus orientalis, Citrus unshiu, Solanum cheesmanii, Lagenorhynchus obliquidens, Acer platanoides, Citrus limon, Acrantophis dumerili, Solanum commersonii, Gossypium arboreum, Prunus persica, Pleurotus ostreatus, Abies firma, Gazella leptoceros, Salmo salar, Homarus americanus, Abies magnifica, Bos javanicus, Phoca largha, Sus cebifrons, Solanum melongena, Phoca vitulina, Pinus sylvestris, Zamia floridana, Vulpes corsac, Allium porrum, Phoca caspica, Vulpes chama, Taxus chinensis, Brassica oleracea var. botrytis, Anser anser anser, Phaseolus lunatus, Brassica campestris, Acer saccharum, Pinus pumila, Solanum pennellii, Pinus edulis, Ipomoea cordatotriloba, Populus alba, Oncorhynchus clarki, Quercus petraea, Sus verrucosus, Equus caballus przewalskii, Populus euphratica, Xenopus tropicalis, Taxus brevifolia, Lama guanicoe, Pinus banksiana, Solanum nigrum, Sus celebensis, Brassica juncea, Lagenorhynchus cruciger, Populus tremuloides, Pinus pungens, Bubalus quarlesi, Quercus gamelliflora, Ovis orientalis musimon, Bubalus bubalis, Pinus luchuensis, Sus philippensis, Phaseolus vulgaris, Salmo trutta, Acipenser persicus, Solanum brevidens, Pinus resinosa, Hippotragus niger, Capra nubiana, Asparagus scaber, Ipomoea platensis, Sus scrofa, Capra aegagrus, Lathyrus sativus, Sargocentron tiere, Hippoglossus hippoglossus, Acorus americanus, Equus caballus, Bos taurus, Barbarea vulgaris, Lama guanicoe pacos, Pinus pinaster, Octopus vulgaris, Solanum crispum, Hippotragus equinus, Equus burchellii antiquorum, Crossarchus alexandri, Ipomoea alba, Triticum monococcum, Populus jackii, Lagenorhynchus australis, Gazella dorcas, Quercus coccifera, Anser caerulescens, Acorus calamus, Pinus roxburghii, Pinus tabuliformis, Zamia fischeri, Grus carunculatus, Acomys cahirinus, Cucumis melo var. reticulatus, Gallus lafayettei, Pisum sativum, Pinus attenuata, Pinus clausa, Gazella saudiya, Capra ibex, Ipomoea trifida, Zea luxurians, Pinus krempfii, Acomys wilsoni, Petroselinum crispum, Quercus palustris, Triticum timopheevi, Meleagris gallopavo, Brassica oleracea, Brassica oleracea, Beta vulgaris, Solanum lycopersicum, Phaseolus vulgaris, Xiphias gladius, Morone saxatilis, Micropterus salmoides, Placopecten magellanicus, Sprattus sprattus, Clupea harengus, Engraulis encrasicolus, Cucurbita maxima, Agaricus bisporus, Musa acuminata x balbisiana, Malus domestica, Cicer arietinum, Anas platyrhynchos, Vaccinium macrocarpum, Rubus idaeus x strigosus, Vaccinium angustifolium, Fragaria ananassa, Rubus fruticosus, Cucumis melo, Ananas comosus, Cucurbita pepo, Cucurbita moschata, Sus scrofa domesticus, Ocimum basilicum, Rosmarinus officinalis, Foeniculum vulgare, Rheum rhabarbarum, Carica papaya, Mangifera indica, Actinidia deliciosa, Prunus armeniaca, Prunus avium, Cocos nucifera, Olea europaea, Pyrus communis, Ficus carica, Passiflora edulis, Oryza sativa subsp. Japonica, Oryza sativa subsp. Indica, Coturnix coturnix, Saccharomyces cerevisiae.

[0106] In some embodiments the nutritive protein comprises or consists of a derivative or mutein of a fragment of a protein that naturally occurs in an edible species. Such a nutrive protein may be referred to as an “engineered nutritive protein.” In such embodiments the natural protein or fragment thereof is a “reference” protein or polypeptide and the engineered nutritive protein or a first polypeptide sequence thereof comprises at least one sequence modification relative to the amino acid sequence of the reference protein or polypeptide. For example, in some embodiments the engineered nutritive protein or first polypeptide sequence thereof is at least 40%, 45%, 50%, 55%, 60%, 65%, 70%, 75%, 80%, 85%, 86%, 87%, 88%, 89%, 90%, 91%, 92%, 93%, 94%, 95%, 96%, 97%, 98%, 99%, or 99.5% homologous to at least one reference nutritive protein amino acid sequence. Typically the ratio of at least one of branch chain amino acid residues to total amino acid residues, essential amino acid residues to total amino acid residues, and leucine residues to total amino acid residues, present in the engineered nutritive protein or a first polypeptide sequence thereof is greater than the correspondeing ratio of at least one of branch chain amino acid residues to total amino acid residues, essential amino acid residues to total amino acid residues, and leucine residues to total amino acid residues present in the reference nutritive protein or polypeptide sequence.

[0107] In some embodiments the nutritive protein is an abundant protein in food or a derivative or mutein thereof, or is a fragment of an abundant protein in food or a derivative or mutein thereof. An abundant protein is a protein that is present in a higher concentration in a food relative to other proteins present in the food. The food can be a known component of the diet of only a small group of a type of mammal in a limited geographic location, or a dietary staple throughout much of the world. In some embodiments the abundant protein in food is selected from chicken egg proteins such as ovalbumin, ovotransferrin, and ovomucuoid; meat proteins such as myosin, actin, tropomyosin, collagen, and troponin; cereal proteins such as casein, alpha1 casein, alpha2 casein, beta casein, kappa casein, beta-lactoglobulin, alpha-lactalbumin, glycinin, beta-conglycinin, glutelin, prolamine, gliadin, glutenin, albumin, globulin; chicken muscle proteins such as albumin, enolase, creatine kinase, phosphoglycerate mutase, triosephosphate isomerase, apolipoprotein, ovotransferrin, phosphoglucomutase, phosphoglycerate kinase, glycerol-3-phosphate dehydrogenase, glyceraldehyde 3-phosphate dehydrogenase, hemoglobin, cofilin, glycogen phosphorylase, fructose-1,6-bisphosphatase, actin, myosin, tropomyosin a-chain, casein kinase, glycogen phosphorylase, fructose-1,6-bisphosphatase, aldolase, tubulin, vimentin, endoplasmin, lactate dehydrogenase, destrin, transthyretin, fructose bisphosphate aldolase, carbonic anhydrase, aldehyde dehydrogenase, annexin, adenosyl homocysteinase; pork muscle proteins such as actin, myosin, enolase, titin, cofilin, phosphoglycerate kinase, enolase, pyruvate dehydrogenase, glycogen phosphorylase, triosephosphate isomerase, myokinase; and fish proteins such as parvalbumin, pyruvate dehydrogenase, desmin, and triosephosphate isomerase.

[0108] Three natural sources of protein generally regarded as good sources of high quality amino acids are whey protein, egg protein, and soy protein. Each source comprises multiple proteins. Table 1 presents the weight proportional representation of each amino acid in the protein source (g AA/g protein) expressed as a percentage.

TABLE 1

| Amino Acid | Whey | Egg | Soy |
|---|---|---|---|
| Isoleucine | 6.5% | 5.5% | 5.0% |
| Leucine | 11.0% | 8.6% | 8.0% |
| Lysine | 9.1% | 7.2% | 6.3% |
| Methionine | 2.1% | 3.1% | 1.3% |
| Phenylalanine | 3.4% | 5.3% | 1.2% |
| Threonine | 7.0% | 4.8% | 3.7% |
| Tryptophan | 1.7% | 1.2% | 1.3% |
| Valine | 6.2% | 6.1% | 4.9% |
| Histidine | 2.0% | 2.4% | 2.7% |
| Other | 51.7% | 49.5% | 60.4% |

[0109] Based on the percentages presented in Table 1, the weight proportion of each protein source that is essential amino acids, branched chain amino acids (L, I, and V), and leucine (L) is presented in Table 2.

TABLE 2

| | Essential | Branch Chain | |
|---|---|---|---|
| Protein Source | Amino Acids | Amino Acids | Leucine |
| Whey | 49.0% | 23.7% | 11.0% |
| Egg | 50.5% | 20.1% | 8.6% |
| Soy | 39.6% | 17.9% | 8.0% |

[0110] The sources relied on to determine the amino acid content of Whey are: Belitz H D., Grosch W., and Schieberle P. Food Chemistry (4th Ed). Springer-Verlag, Berlin Heidelberg 2009; http://www.gnc.com/product/index.jsp?productId=2986027; http://www.nutrabio.com/Products/wheyprotein_concentrate.htm; and http://nutrabio.com/Products/wheyprotein_isolate.htm. The amino acid content values from those sources were averaged to give the numbers presented in Tables 1 and 2. The source for soy protein is Egg, National Nutrient Database for Standard Reference, Release 24 (http://ndb.nal.usda.gov/ndb/foods/list). The source for soy protein is Self Nutrition Data (http://nutritiondata.self.com/facts/legumes-and-legume-products/4389/2).

[0111] As used herein, “whey protein” or “whey” means a protein mixture comprising an amino acid composition according to Tables 1 and 2. As used herein, whey protein comprises 49% essential amino acids, 24% branch chain amino acids, and 11% leucine, by weight.

[0112] As used herein, “egg protein” or “egg” means a protein mixture comprising an amino acid composition according to Tables 1 and 2. As used herein, egg protein comprises 51% essential amino acids, 20% branch chain amino acids, and 9% leucine, by weight.

[0113] As used herein, “soy protein” or “soy” means a protein mixture comprising an amino acid composition according to Tables 1 and 2. As used herein, soy protein comprises 40% essential amino acids, 18% branch chain amino acids, and 8% leucine, by weight.

[0114] Soluble nutritive proteins are particularly useful in some instances. A limitation of many proteins, including whey protein, egg protein, and soy protein, is that the proteins are not sufficiently soluble for certain purposes. In some embodiments this disclosure provides nutritive proteins that are more soluble than at least one of whey protein, egg protein, and soy protein.

[0115] One well characterized protein with a degree of solubility that is useful for certain purposes is gelatin. Commercial bone gelatin comprises 18% essential amino acids, 7.76% percent branch chain amino acids, and 3.45% leucine. (Eastoe, J. E., “The Amino Acid Composition of Mammalian Collagen and Gelatin,” Biochem. J., Vol. 61, pp. 589-600 (1955).) As used herein, “gelatin protein” or “gelatin” means a protein mixture comprising 18% essential amino acids, 8% branch chain amino acids, and 4% leucine, by weight. Comparing these amino acid content numbers to whey protein, egg protein, and soy protein reveals that at least in the case of gelatin there is a tradeoff between solubility and nutritive amino acid content. In many embodiments this disclosure provides proteins that have a useful solubility profile and comprise at least one of 18% essential amino acids, 8% branch chain amino acids, and 4% leucine, by weight.

[0116] In some instances herein the portion of amino acid(s) of a particular type within a polypeptide, protein or a composition is quantified based on the weight proportion of the type of amino acid(s) to the total weight of amino acids present in the polypeptide, protein or composition in question. This value is calculated by dividing the weight of the particular amino acid(s) in the polypeptide, protein or a composition by the weight of all amino acids present in the polypeptide, protein or a composition.

[0117] In other instances the ratio of a particular type of amino acid(s) residues present in a polypeptide or protein to the total number of amino acids present in the polypeptide or protein in question is used. This value is calculated by dividing the number of the amino acid(s) in question that is present in each molecule of the polypeptide or protein by the total number of amino acid residues present in each molecule of the polypeptide or protein. A skilled artisan appreciates that these two methods are similar and that the weight proportion of a type of amino acid(s) present in a polypeptide or protein can be converted to a ratio of the particular type of amino acid residue(s), and vice versa.

[0118] In certain embodiments herein the weight proportion of branched chain amino acids, leucine, and/or essential amino acids in whey, egg, soy, or gelatin is used as a benchmark to measure the amino acid composition of a polypeptide, a protein, or a composition comprising at least one of a polypeptide and a protein. In those embodiments it is understood that the two measures are not completely equivalent, but it is also understood that the measures result in measurements that are similar enough to use for this purpose. For example, when a protein of interest is characterized as comprising a ratio of branch chain amino acid residues to total amino acid residues that is equal to or greater than 24% (the weight proportion of branch chain amino acid residues present in whey), that is a precise description of the branch chain amino acid content of the protein. At the same time, the weight proportion of branch chain amino acid residues present in that protein is not necessarily exactly equal to 24%. Even so, the skilled artisan understands that this is a useful comparison. If provided with the total number of amino acid residues present in the protein of interest the skilled artisan can also determine the weight proportion of branch chain amino acid residues in the protein of interest.

[0119] In some embodiments a nutritive protein according to this disclosure comprises a first polypeptide sequence that is homologous to a fragment of a naturally occurring nutritive protein and the first polypeptide sequence comprises a ratio of branch chain amino acid residues to total amino acid residues that is equal to or greater than the ratio of branch chain amino acid residues to total amino acid residues present in at least one of whey protein, egg protein, soy protein, and gelatin protein. Thus, in such embodiments the first polypeptide sequence comprises a ratio of branch chain amino acid residues to total amino acid residues that is equal to or greater than a ratio selected from 24%, 20%, 18, and 8%.

[0120] In some embodiments a nutritive protein according to this disclosure comprises a first polypeptide sequence that is homologous to a fragment of a naturally occurring nutritive protein and the first polypeptide sequence comprises a ratio of L residues to total amino acid residues that is equal to or greater than the ratio of L residues to total amino acid residues present in at least one of whey protein, egg protein, and soy protein. Thus, in such embodiments the first polypeptide sequence comprises a ratio of L residues to total amino acid residues that is equal to or greater than a ratio selected from 11%, 9%, 8, and 4%.

[0121] In some embodiments a nutritive protein according to this disclosure comprises a first polypeptide sequence that is homologous to a fragment of a naturally occurring nutritive protein and the first polypeptide sequence comprises a ratio of essential amino acid residues to total amino acid residues that is equal to or greater than the ratio of essential amino acid residues to total amino acid residues present in at least one of whey protein, egg protein, soy protein, and gelatin protein. Thus, in such embodiments the first polypeptide sequence comprises a ratio of essential amino acid residues to total amino acid residues that is equal to or greater than a ratio selected from 49%, 51%, 40, and 18%.

[0122] In some embodiments the nutritive protein comprises a first polypeptide sequence that is homologous to a fragment of a naturally occurring nutritive protein and the first polypeptide sequence comprises a ratio of branch chain amino acid residues to total amino acid residues that is equal to or greater than the ratio of branch chain amino acid residues to total amino acid residues present in at least one of whey protein, egg protein, soy protein, and gelatin protein; and comprises a ratio of L residues to total amino acid residues that is equal to or greater than the ratio of L residues to total amino acid residues present in at least one of whey protein, egg protein, soy protein, and gelatin protein. In some such embodiments the first polypeptide sequence further comprises a ratio of essential amino acid residues to total amino acid residues that is equal to or greater than the ratio of essential amino acid residues to total amino acid residues present in at least one of whey protein, egg protein, soy protein, and gelatin protein.

[0123] In some embodiments the nutritive protein comprises a first polypeptide sequence that is homologous to a fragment of a naturally occurring nutritive protein and the first polypeptide sequence comprises a ratio of branch chain amino acid residues to total amino acid residues equal to or greater than 24% and a ratio of L residues to total amino acid residues that is equal to or greater than 11%. In some such embodiments the first polypeptide sequence further comprises a ratio of essential amino acid residues to total amino acid residues equal to or greater than 49%.

[0124] In some embodiments the nutritive protein comprises a first polypeptide sequence that is homologous to a fragment of a naturally occurring nutritive protein and the first polypeptide sequence comprises a ratio of branch chain amino acid residues to total amino acid residues equal to or greater than 20% and a ratio of L residues to total amino acid residues that is equal to or greater than 9%. In some such embodiments the first polypeptide sequence further comprises a ratio of essential amino acid residues to total amino acid residues equal to or greater than 51%.

[0125] In some embodiments the nutritive protein comprises a first polypeptide sequence that is homologous to a fragment of a naturally occurring nutritive protein and the first polypeptide sequence comprises a ratio of branch chain amino acid residues to total amino acid residues equal to or greater than 18% and a ratio of L residues to total amino acid residues that is equal to or greater than 8%. In some such embodiments the first polypeptide sequence further comprises a ratio of essential amino acid residues to total amino acid residues equal to or greater than 40%.

[0126] In some embodiments the nutritive protein comprises a first polypeptide sequence that is homologous to a fragment of a naturally occurring nutritive protein and the first polypeptide sequence comprises a ratio of branch chain amino acid residues to total amino acid residues equal to or greater than 8% and a ratio of L residues to total amino acid residues that is equal to or greater than 4%. In some such embodiments the nutritive protein further comprises a ratio of essential amino acid residues to total amino acid residues equal to or greater than 18%.

[0127] Solubility of nutritive proteins can be measured by any method known in the art. In some embodiments solubility is examined by centrifuge concentration followed by protein concentration assays. Samples of nutritive proteins in 20 mM HEPES pH 7.5 are tested for protein concentration according to protocols using two methods, Coomassie Plus (Bradford) Protein Assay (Thermo Scientific) and Bicinchoninic Acid (BCA) Protein Assay (Sigma-Aldrich). Based on these measurements 10 mg of protein is added to an Amicon Ultra 3 kDa centrifugal filter (Millipore). Samples are concentrated by centrifugation at 10,000×g for 30 minutes. The final, now concentrated, samples are examined for precipitated protein and then tested for protein concentration as above using two methods, Bradford and BCA.

[0128] In some embodiments the nutritive proteins and/or the first polypeptide sequence thereof have a final solubility limit of at least 5 g/L, 10 g/L, 20 g/L, 30 g/L, 40 g/L, 50 g/L, or 100 g/L at physiological pH. In some embodiments the nutritive proteins and/or the first polypeptide sequence thereof are greater than 50%, greater than 60%, greater than 70%, greater than 80%, greater than 90%, greater than 95%, greater than 96%, greater than 97%, greater than 98%, greater than 99%, or greater than 99.5% soluble with no precipitated protein observed at a concentration of greater than 5 g/L, or 10 g/L, or 20 g/L, or 30 g/L, or 40 g/L, or 50 g/L, or 100 g/L at physiological pH. In some embodiments, the solubility of the nutritive proteins and/or the first polypeptide sequence thereof is higher than those typically reported in studies examining the solubility limits of whey (12.5 g/L; Pelegrine et al., Lebensm.-Wiss. U.-Technol. 38 (2005) 77-80) and soy (10 g/L; Lee et al., JAOCS 80(1) (2003) 85-90).

[0129] One feature that can enhance the utility of a nutritive proteins and/or the first polypeptide sequence thereof is its charge (or per amino acid charge). Nutritive proteins and/or the first polypeptide sequence thereof with higher charge can in some embodiments exhibit desirable characteristics such as increased solubility, increased stability, resistance to aggregation, and desirable taste profiles. For example, a charged nutritive proteins and/or the first polypeptide sequence thereof that exhibits enhanced solubility can be formulated into a beverage or liquid formulation that includes a high concentration of nutritive protein in a relatively low volume of solution, thus delivering a large dose of protein nutrition per unit volume. A charged nutritive proteins and/or the first polypeptide sequence thereof that exhibits enhanced solubility can be useful, for example, in sports drinks or recovery drinks wherein a user (e.g., an athlete) wants to ingest nutritive protein before, during or after physical activity. A charged nutritive protein that exhibits enhanced solubility can also be particularly useful in a clinical setting wherein a subject (e.g., a patient or an elderly person) is in need of protein nutrition but is unable to ingest solid foods or large volumes of liquids.

[0130] For example, the net charge (Chargep) of a polypeptide at pH 7 can be calculated using the following formula:

Charge_{P}=−0.002−(C)(0.045)−(D)(0.999)−(E)(0.998)+(H)(0.091)+(K)(1.0)+(R)(1.0)−(Y)(−0.001)

where C is the number of cysteine residues, D is the number of aspartic acid residues, E is the number of glutamic acid residues, H is the number of histidine residues, K is the number of lysine residues, R is the number of arginine residues and Y is the number of tyrosine residues in the polypeptide. The per amino acid charge (Charge_{A}) of the polypeptide can be calculated by dividing the net charge (Charge_{P}) by the number of amino acid residues (N), i.e., Charge_{A}=Charge_{P}/N. (See Bassi S (2007), “A Primer on Python for Life Science Researchers.” PLoS Comput Biol 3(11): e199. doi:10.1371/journal.pcbi.0030199).

[0131] One metric for assessing the hydrophilicity and potential solubility of a given protein or polypeptide is the solvation score. Solvation score is defined as the total free energy of solvation (i.e. the free energy change associated with transfer from gas phase to a dilute solution) for all amino acid side chains if each residue were solvated independently, normalized by the total number of residues in the sequence. The side chain solvation free energies are found computationally by calculating the electrostatic energy difference between a vacuum dielectric of 1 and a water dielectric of 80 (by solving the Poisson-Boltzmann equation) as well as the non-polar, Van der Waals energy using a linear solvent accessible surface area model (D. Sitkoff, K. A. Sharp, B. Honig. “Accurate Calculation of Hydration Free Energies Using Macroscopic Solvent Models”. J. Phys. Chem. 98, 1994). For amino acids with ionizable sidechains (Arg, Asp, Cys, Glu, His, Lys and Tyr), an average solvation free energy is used based on the relative probabilities for each ionization state at the specified pH. Solvation scores start at 0 and continue into negative values, and the more negative the solvation score, the more hydrophilic and potentially soluble the protein is predicted to be. In some embodiments of a nutritive protein, the nutritive protein has a solvation score of −10 or less at pH 7. In some embodiments of a nutritive protein, the nutritive protein has a solvation score of −15 or less at pH 7. In some embodiments of a nutritive protein, the nutritive protein has a solvation score of −20 or less at pH 7. In some embodiments of a nutritive protein, the nutritive protein has a solvation score of −25 or less at pH 7. In some embodiments of a nutritive protein, the nutritive protein has a solvation score of −30 or less at pH 7. In some embodiments of a nutritive protein, the nutritive protein has a solvation score of −35 or less at pH 7. In some embodiments of a nutritive protein, the nutritive protein has a solvation score of −40 or less at pH 7.

[0132] The solvation score is a function of pH by virtue of the pH dependence of the molar ratio of undissociated weak acid ([HA]) to conjugate base ([A⁻]) as defined by the Henderson-Hasselbalch equation:

$$pH = pKa + log ( \frac{[ {A}^{-} ]}{[ HA ]} )$$

[0133] All weak acids have different solvation free energies compared to their conjugate bases, and the solvation free energy used for a given residue when calculating the solvation score at a given pH is the weighted average of those two values.

[0134] Accordingly, in some embodiments of a nutritive protein, the nutritive protein and/or the first polypeptide sequence thereof has a solvation score of −10 or less at an acidic pH. In some embodiments of a nutritive protein, the nutritive proteins and/or the first polypeptide sequence thereof has a solvation score of −15 or less at at an acidic pH. In some embodiments of a nutritive proteins, the nutritive proteins and/or the first polypeptide sequence thereof has a solvation score of −20 or less at an acidic pH. In some embodiments of a nutritive proteins, the nutritive proteins and/or the first polypeptide sequence thereof has a solvation score of −25 or less at an acidic pH. In some embodiments of a nutritive proteins, the nutritive proteins and/or the first polypeptide sequence thereof has a solvation score of −30 or less at an acidic pH. In some embodiments of a nutritive protein, the nutritive proteins and/or the first polypeptide sequence thereof has a solvation score of −35 or less at an acidic pH. In some embodiments of a nutritive protein, the nutritive proteins and/or the first polypeptide sequence thereof has a solvation score of −40 or less at acidic pH.

[0135] Accordingly, in some embodiments of a nutritive protein, the nutritive proteins and/or the first polypeptide sequence thereof has a solvation score of −10 or less at a basic pH. In some embodiments of a nutritive protein, the nutritive proteins and/or the first polypeptide sequence thereof has a solvation score of −15 or less at at a basic pH. In some embodiments of a nutritive protein, the nutritive proteins and/or the first polypeptide sequence thereof has a solvation score of −20 or less at a basic pH. In some embodiments of a nutritive protein, the nutritive proteins and/or the first polypeptide sequence thereof has a solvation score of −25 or less at a basic pH. In some embodiments of a nutritive protein, the nutritive proteins and/or the first polypeptide sequence thereof has a solvation score of −30 or less at a basic pH. In some embodiments of a nutritive protein, the nutritive proteins and/or the first polypeptide sequence thereof has a solvation score of −35 or less at a basic pH. In some embodiments of a nutritive protein, the nutritive proteins and/or the first polypeptide sequence thereof has a solvation score of −40 or less at basic pH.

[0136] Accordingly, in some embodiments of a nutritive protein, the nutritive proteins and/or the first polypeptide sequence thereof has a solvation score of −10 or less at a pH range selected from 2-3, 3-4, 4-5, 5-6, 6-7, 7-8, 8-9, 9-10, 10-11, and 11-12. In some embodiments of a nutritive protein, the nutritive proteins and/or the first polypeptide sequence thereof has a solvation score of −15 or less at at a pH range selected from 2-3, 3-4, 4-5, 5-6, 6-7, 7-8, 8-9, 9-10, 10-11, and 11-12. In some embodiments of a nutritive protein, the nutritive proteins and/or the first polypeptide sequence thereof has a solvation score of −20 or less at a pH range selected from 2-3, 3-4, 4-5, 5-6, 6-7, 7-8, 8-9, 9-10, 10-11, and 11-12. In some embodiments of a nutritive protein, the nutritive proteins and/or the first polypeptide sequence thereof has a solvation score of −25 or less at a pH range selected from 2-3, 3-4, 4-5, 5-6, 6-7, 7-8, 8-9, 9-10, 10-11, and 11-12. In some embodiments of a nutritive protein, the nutritive proteins and/or the first polypeptide sequence thereof has a solvation score of −30 or less at a pH range selected from 2-3, 3-4, 4-5, 5-6, 6-7, 7-8, 8-9, 9-10, 10-11, and 11-12. In some embodiments of a nutritive protein, the nutritive proteins and/or the first polypeptide sequence thereof has a solvation score of −35 or less at a pH range selected from 2-3, 3-4, 4-5, 5-6, 6-7, 7-8, 8-9, 9-10, 10-11, and 11-12. In some embodiments of a nutritive protein, the nutritive proteins and/or the first polypeptide sequence thereof has a solvation score of −40 or less at a pH range selected from 2-3, 3-4, 4-5, 5-6, 6-7, 7-8, 8-9, 9-10, 10-11, and 11-12.

[0137] The aggregation score is a primary sequence based metric for assessing the hydrophobicity and likelihood of aggregation of a given protein. Using the Kyte and Doolittle hydrophobity scale (Kyte J, Doolittle R F (May 1982) “A simple method for displaying the hydropathic character of a protein”. J. Mol. Biol. 157 (1): 105-32), which gives hydrophobic residues positive values and hydrophilic residues negative values, the average hydrophobicity of a protein sequence is calculated using a moving average of five residues. The aggregation score is drawn from the resulting plot by determining the area under the curve for values greater than zero and normalizing by the total length of the protein. The underlying hypothesis is that aggregation is the result of two or more hydrophobic patches coming together to exclude water and reduce surface exposure, and the likelihood that a protein will aggregate is a function of how densely packed its hydrophobic (i.e., aggregation prone) residues are. Aggregation scores start at 0 and continue into positive values, and the smaller the aggregation score, the less hydrophobic and potentially less prone to aggregation the protein is predicted to be. In some embodiments of a nutritive protein, the nutritive proteins and/or the first polypeptide sequence thereof has an aggregation score of 2 or less. In some embodiments of a nutritive protein, the nutritive proteins and/or the first polypeptide sequence thereof has an aggregation score of 1.5 or less. In some embodiments of a nutritive protein, the nutritive proteins and/or the first polypeptide sequence thereof has an aggregation score of 1 or less. In some embodiments of a nutritive protein, the nutritive proteins and/or the first polypeptide sequence thereof has an aggregation score of 0.9 or less. In some embodiments of a nutritive protein, the nutritive proteins and/or the first polypeptide sequence thereof has an aggregation score of 0.8 or less. In some embodiments of a nutritive protein, the nutritive proteins and/or the first polypeptide sequence thereof has an aggregation score of 0.7 or less. In some embodiments of a nutritive protein, the nutritive proteins and/or the first polypeptide sequence thereof has an aggregation score of 0.6 or less. In some embodiments of a nutritive protein, the nutritive proteins and/or the first polypeptide sequence thereof has an aggregation score of 0.5 or less. In some embodiments of a nutritive protein, the nutritive proteins and/or the first polypeptide sequence thereof has an aggregation score of 0.4 or less. In some embodiments of a nutritive protein, the nutritive proteins and/or the first polypeptide sequence thereof has an aggregation score of 0.3 or less. In some embodiments of a nutritive protein, the nutritive proteins and/or the first polypeptide sequence thereof has an aggregation score of 0.2 or less. In some embodiments of a nutritive protein, the nutritive proteins and/or the first polypeptide sequence thereof has an aggregation score of 0.1 or less.

[0138] In some cases, soluble expression is desirable because it can increase the amount and/or yield of the nutritive protein and facilitate one or more of the isolation and purification of the nutritive protein. In some embodiments, the nutritive proteins of this disclosure are solubly expressed in the host organism. Solvation score and aggregation score can be used to predict soluble expression of recombinant nutritive proteins in a host organism. As shown in Example 4, this disclosure provides evidence suggesting that nutritive proteins with solvation scores of ≦−20 and aggregation scores of ≦0.75 are more likely to be recombinantly expressed in a particular E. coli expression system. Moreover, the data also suggests that nutritive proteins with solvation scores of ≦−20 and aggregation scores of ≦0.5 are more likely to be solubly expressed in this system. Therefore, in some embodiments the nutritive protein of this disclosure has a solvation score of −20 or less. In some embodiments the nutritive protein has an aggregation score of 0.75 or less. In some embodiments the nutritive protein has an aggregation score of 0.5 or less. In some embodiments the nutritive protein has a solvation score of −20 or less and an aggregation score of 0.75 or less. In some embodiments the nutritive protein has a solvation score of −20 or less and an aggregation score of 0.5 or less.

[0139] In some embodiments the nutritive protein is selected from SEQ ID NO: 1 to 1052. In some embodiments the nutritive protein is selected from a modified derivative of SEQ ID NO: 1 to 1052. In some embodiments the nutritive protein is selected from a mutein of SEQ ID NO: SEQ ID NO: 1 to 1052.

[0140] In some embodiments the nutritive protein is a nutritive protein other than at least one nutritive protein selected from egg proteins such as ovalbumin, ovotransferrin, and ovomucuoid; meat proteins such as myosin, actin, tropomyosin, collagen, and troponin; milk proteins such as whey and casein; cereal proteins such as casein, alpha1 casein, alpha2 casein, beta casein, kappa casein, beta-lactoglobulin, alpha-lactalbumin, glycinin, beta-conglycinin, glutelin, prolamine, gliadin, glutenin, albumin, globulin; chicken muscle proteins such as albumin, enolase, creatine kinase, phosphoglycerate mutase, triosephosphate isomerase, apolipoprotein, ovotransferrin, phosphoglucomutase, phosphoglycerate kinase, glycerol-3-phosphate dehydrogenase, glyceraldehyde 3-phosphate dehydrogenase, hemoglobin, cofilin, glycogen phosphorylase, fructose-1,6-bisphosphatase, actin, myosin, tropomyosin a-chain, casein kinase, glycogen phosphorylase, fructose-1,6-bisphosphatase, aldolase, tubulin, vimentin, endoplasmin, lactate dehydrogenase, destrin, transthyretin, fructose bisphosphate aldolase, carbonic anhydrase, aldehyde dehydrogenase, annexin, adenosyl homocysteinase; pork muscle proteins such as actin, myosin, enolase, titin, cofilin, phosphoglycerate kinase, enolase, pyruvate dehydrogenase, glycogen phosphorylase, triosephosphate isomerase, myokinase; and fish proteins such as parvalbumin, pyruvate dehydrogenase, desmin, and triosephosphate isomerase.

[0141] Phenylketonuria (PKU) is an autosomal recessive metabolic genetic disorder characterized by a mutation in the gene for the hepatic enzyme phenylalanine hydroxylase (PAH), rendering it nonfunctional. This enzyme is necessary to metabolize phenylalanine to tyrosine. When PAH activity is reduced, phenylalanine accumulates and is converted into phenylpyruvate (also known as phenylketone), which is detected in the urine. Untreated children are normal at birth, but fail to attain early developmental milestones, develop microcephaly, and demonstrate progressive impairment of cerebral function. Hyperactivity, EEG abnormalities and seizures, and severe learning disabilities are major clinical problems later in life. A characteristic odor of skin, hair, sweat and urine (due to phenylacetate accumulation); and a tendency to hypopigmentation and eczema are also observed. All PKU patients must adhere to a special diet low in Phe. Accordingly, nutritive proteins comprising a low number or no Phe residues are desirable for PKU patients. Such proteins can be obtained by selecting nutritive proteins provided herein that have few or no Phe residues. Accordingly, in some embodiments the nutritive protein comprises a ratio of Phe residues to total amino acid residues equal to or lower than 5%, 4%, 3%, 2%, or 1%. In some embodiments the nutritive protein comprises 10 or fewer Phe residues, 9 or fewer Phe residues, 8 or fewer Phe residues, 7 or fewer Phe residues, 6 or fewer Phe residues, 5 or fewer Phe residues, 4 or fewer Phe residues, 3 or fewer Phe residues, 2 or fewer Phe residues, 1 Phe residue, or no Phe residues. In some embodiments, the nutritive protein comprises no Phe residues.

[0142] Arginine is a conditionally nonessential amino acid, meaning most of the time it can be manufactured by the human body, and does not need to be obtained directly through the diet. Individuals who have poor nutrition, the elderly, or people with certain physical conditions (e.g., sepsis) may not produce sufficient amounts of arginine and therefore need to increase their intake of foods containing arginine. Arginine is believed to have benefical health properties, including reducing healing time of injuries (particularly bone), and decreasing blood pressure, particularly high blood pressure during high risk pregnancies (pre-eclampsia). In addition, studies have shown that dietary supplementation with L-arginine is beneficial for enhancing the reproductive performance of pigs with naturally occurring in-trauterine growth retardation, enhancing protein deposition and postnatal growth of milk-fed piglets, normalizing plasma glucose levels in streptozotocin-induced diabetic rats, reducing fat mass in obese Zucker diabetic fatty (ZDF) rats, and improving vascular function in diabetic rats. In order to combine these benefits with at least one utility of the nutritive proteins disclosed herein, in some embodiments of the nutritive proteins disclosed herein the nutritive protein comprises a ration of Arginine residues to total amino acid residues in the nutritive protein of equal to or greater than 3%, equal to or greater than 4%, equal to or greater than 5%, equal to or greater than 6%, equal to or greater than 7%, equal to or greater than 8%, equal to or greater than 9%, equal to or greater than 10%, equal to or greater than 11%, or equal to or greater than 12%.

[0143] Digestibility is a parameter relevant to the nutritive benefits and utility of nutritive proteins. Information relating to the relative completeness of digestion can serve as a predictor of peptide bioavailability (Daniel, H., 2003. Molecular and Integrative Physiology of Intestinal Peptide Transport. Annual Review of Physiology, Volume 66, pp. 361-384). In some embodiments nutritive proteins disclosed herein are screened to assess their digestibility. Digestibility of nutritive proteins can be assessed by any suitable method known in the art. In some embodiments digestability is assessed by a physiologically relevant in vitro digestion reaction that includes one or both phases of protein digestion, simulated gastric digestion and simulated intestinal digestion (see, e.g., Moreno, et al., 2005. Stability of the major allergen Brazil nut 2S albumin (Ber e 1) to physiologically relevant in vitro gastrointestinal digestion. FEBS Journal, pp. 341-352; Martos, G., Contreras, P., Molina, E. & Lopez-Fandino, R., 2010. Egg White Ovalbumin Digestion Mimicking Physiological Conditions. Journal of Agricultural and food chemistry, pp. 5640-5648; Moreno, F. J., Mackie, A. R. & Clare Mills, E. N., 2005. Phospholipid interactions protect the milk allergen a-Lactalbumin from proteolysis during in vitro digestion. Journal of agricultural and food chemistry, pp. 9810-9816). Briefly, test proteins are sequentially exposed to a simulated gastric fluid (SGF) for 120 minutes (the length of time it takes 90% of a liquid meal to pass from the stomach to the small intestine; see Kong, F. & Singh, R. P., 2008. Disintegration of Solid Foods in Human Stomach. Journal of Food Science, pp. 67-80) and then transferred to a simulated duodenal fluid (SDF) to digest for an additional 120 minutes. Samples at different stages of the digestion (e.g., 2, 5, 15, 30, 60 and 120 min) are analyzed by electrophoresis (e.g., chip electrophoresis or SDS-PAGE) to monitor the size and amount of intact protein as well as any large digestion fragments (e.g., larger than 4 kDa). The disappearance of protein over time indicates the rate at which the protein is digested in the assay. By monitoring the amount of intact protein observed over time, the half-life (τ_{1/2}) of digestion is calculated for SGF and, if intact protein is detected after treatment with SGF, the τ_{1/2} of digestion is calculated for SIF. This assay can be used to assess comparative digestibility (i.e., against a benchmark protein such as whey) or to assess absolute digestibility. In some embodiments the digestibility of the nutritive protein is higher (i.e., the SGF τ_{1/2} and/or SIF τ_{1/2} is shorter) than whey protein. In some embodiments the nutritive protein has a SGF τ_{1/2} of 30 minutes or less, 20 minutes or less, 15 minutes or less, 10 minutes or less, 5 minutes or less, 4 minutes or less, 3 minutes or less, 2 minutes or less or 1 minute or less. In some embodiments the nutritive protein has a SIF τ_{1/2} of 30 minutes or less, 20 minutes or less, 15 minutes or less, 10 minutes or less, 5 minutes or less, 4 minutes or less, 3 minutes or less, 2 minutes or less or 1 minute or less. In some embodiments the nutritive protein is not detectable in one or both of the SGF and SIF assays by 2 minutes, 5 minutes, 15 minutes, 30 minutes, 60 minutes, or 120 minutes. In some embodiments the nutritive protein is digested at a constant rate and/or at a controlled rate in one or both of SGF and SIF. In such embodiments the rate of digestion of the nutritive protein may not be optimized for the highest possible rate of digestion. In such embodiments the rate of absorption of the protein following ingestion by a mammal may be slower and the total time period over which absorption occurs following ingestion may be longer than for nutritive proteins of similar amino acid composition that are digested at a faster initial rate in one or both of SGF and SIF. In some embodiments the nutritive protein is completely or substantially completely digested in SGF. In some embodiments the nutritive protein is substantially not digested or not digested by SGF; in most such embodiments the protein is digested in SIF.Assessing protein digestibility can also provide insight into a protein's potential allergenicity, as proteins or large fragments of proteins that are resistant to digestive proteases can have a higher risk of causing an allergenic reaction (Goodman, R. E. et al., 2008. Allergenicity assessment of genetically modified crops—what makes sense? Nature Biotechnology, pp. 73-81). To detect and identify peptides too small for chip electrophoresis analysis, liquid chromatography and mass spectrometry can be used. In SGF samples, peptides can be directly detected and identified by LC/MS. SIF protein digestions may require purification to remove bile acids before detection and identification by LC/MS.

[0144] In some embodiments digestibility of a nutritive protein is assessed by identification and quantification of digestive protease recognition sites in the protein amino acid sequence. In some embodiments the nutritive protein comprises at least one protease recognition site selected from a pepsin recognition site, a trypsin recognition site, and a chymotrypsin recognition site.

[0145] As used herein, a “pepsin recognition site” is any site in a polypeptide sequence that is experimentally shown to be cleaved by pepsin. In some embodiments it is a peptide bond after (i.e., downstream of) an amino acid residue selected from Phe, Trp, Tyr, Leu, Ala, Glu, and Gln, provided that the following residue is not an amino acid residue selected from Ala, Gly, and Val.

[0146] As used herein, a “trypsin recognition site” is any site in a polypeptide sequence that is experimentally shown to be cleaved by trypsin. In some embodiments it is a peptide bond after an amino acid residue selected from Lys or Arg, provided that the following residue is not a proline.

[0147] As used herein, a “chymotrypsin recognition site” is any site in a polypeptide sequence that is experimentally shown to be cleaved by chymotrypsin. In some embodiments it is a peptide bond after an amino acid residue selected from Phe, Trp, Tyr, and Leu.

[0148] Disulfide bonded cysteine residues in a protein tend to reduce the rate of digestion of the protein compared to what it would be in the absence of the disulfide bond. For example, it has been shown that the rate of digestion of the protein b-lactoglobulin is increased when its disulfide bridges are cleaved (I. M. Reddy, N. K. D. Kella, and J. E. Kinsella. “Structural and Conformational Basis of the Resistance of B-Lactoglobulin to Peptic and Chymotryptic Digestion”. J. Agric. Food Chem. 1988, 36, 737-741). Accordingly, digestibility of a nutritive protein with fewer disulfide bonds tends to be higher than for a comparable nutritive protein with a greater number of disulfide bonds. In some embodiments the nutritive proteins disclosed herein are screened to identify the number of cysteine residues present in each and in particular to allow selection of a nutritive protein comprising a relatively low number of cysteine residues. For example, naturally occurring nutritive proteins or fragments may be identified that comprise a no Cys residues or that comprise a relatively low number of Cys residues, such as 10 or fewer Cys residues, 9 or fewer Cys residues, 8 or fewer Cys residues, 7 or fewer Cys residues, 6 or fewer Cys residues, 5 or fewer Cys residues, 4 or fewer Cys residues, 3 or fewer Cys residues, 2 or fewer Cys residues, 1 Cys residue, or no Cys residues. In some embodiments one or more Cys residues in a naturally occurring nutritive protein or fragment thereof is removed by deletion and/or by substitution with another amino acid. In some embodiments 1 Cys residue is deleted or replaced, 1 or more Cys residues are deleted or replaced, 2 or more Cys residues are deleted or replaced, 3 or more Cys residues are deleted or replaced, 4 or more Cys residues are deleted or replaced, 5 or more Cys residues are deleted or replaced, 6 or more Cys residues are deleted or replaced, 7 or more Cys residues are deleted or replaced, 8 or more Cys residues are deleted or replaced, 9 or more Cys residues are deleted or replaced, or 10 or more Cys residues are deleted or replaced. In some embodiments the nutritive protein of this disclosure comprises a ratio of Cys residues to total amino acid residues equal to or lower than 5%, 4%, 3%, 2%, or 1%. In some embodiments the nutritive protein comprises 10 or fewer Cys residues, 9 or fewer Cys residues, 8 or fewer Cys residues, 7 or fewer Cys residues, 6 or fewer Cys residues, 5 or fewer Cys residues, 4 or fewer Cys residues, 3 or fewer Cys residues, 2 or fewer Cys residues, 1 Cys residue, or no Cys residues. In some embodiments, the nutritive protein comprises 1 or fewer Cys residues. In some embodiments, the nutritive protein comprises no Cys residues.

[0149] Alternatively or in addition, disulfide bonds that are or may be present in a nutritive protein may be removed. Disulfides can be removed using chemical methods by reducing the disulfide to two thiol groups with reducing agents such as beta-mercaptoethanol, dithiothreitol (DTT), or tris(2-carboxyethyl)phosphine (TCEP). The thiols can then be covalently modified or “capped” with reagents such as iodoacetamide, N-ethylmaleimide, or sodium sulfite (see, e.g., Crankshaw, M. W. and Grant, G. A. 2001. Modification of Cysteine. Current Protocols in Protein Science. 15.1.1-15.1.18).

[0150] Eukaryotic proteins are often glycosylated, and the carbohydrate chains that are attached to proteins serve various functions. N-linked and O-linked glycosylation are the two most common forms of glycosylation occurring in proteins. N-linked glycosylation is the attachment of a sugar molecule to a nitrogen atom in an amino acid residue in a protein. N-linked glycosylation occurs at Asparagine and Arginine residues. O-linked glycosylation is the attachment of a sugar molecule to an oxygen atom in an amino acid residue in a protein. O-linked glycosylation occurs at Threonine and Serine residues.

[0151] Glycosylated proteins are often more soluble than their un-glycosylated forms. In terms of protein drugs, proper glycosylation usually confers high activity, proper antigen binding, better stability in the blood, etc. However, glycosylation necessarily means that a protein “carries with it” sugar moieties. Such sugar moieties may reduce the usefulness of the nutritive proteins of this disclosure including recombinant nutritive proteins. For example, as demonstrated in the examples, a comparison of digestion of glycosylated and non-glycosylated forms of the same proteins shows that the non-glycosylated forms are digested more quickly than the glycosylated forms. For these reasons, in some embodiments the nutrive proteins according to the disclosure comprise low or no glycosylation. For example, in some embodiments the nutritive proteins comprise a ratio of non-glycosilated to total amino acid residues of at least 80%, at least 85%, at least 90%, at least 95%, at least 96%, at least 97%, at least 98%, or at least 99%. In some embodiments the nutritive proteins to not comprise any glycosylation.

[0152] In some embodiments, the nutritive protein according to the disclosure is de-glycosylated after it is produced or after it is isolated. Nutritive proteins of low or no glycosylation may be made by any method known in the art. For example, enzymatic and/or chemical methods may be used (Biochem. J. (2003) 376, p 339-350.). Enzymes are produced commercially at research scales for the removal of N-linked and O-linked oligosaccharides. Chemical methods include use of trifluoromethanesulfonic acid to selectively break N-linked and O-linked peptide-saccharide bonds. This method often results in a more complete deglycosylation than does the use of enzymatic methods.

[0153] In other embodiments, the nutritive protein according to the disclosure is produced with low or no glycosylation by chemical synthesis or by a host organism. Most bacteria and other prokaryotes have very limited capabilities to glycosylate proteins, especially heterologous proteins. Accordingly, in some embodiments of this disclosure a nutritive protein is made recombinantly in a microorganism such that the level of glycosylation of the recombinant protein is low or no glycosylation. In some embodiments the level of glycosylation of the recombinant nutritive protein is lower than the level of glycosylation of the protein as it occurs in the organism from which it is derived.

[0154] In some embodiments a nutritive protein or polypeptide according to the disclosure comprises a ratio of amino acids selected from Asn, Arg, Ser, and Thr to total amino acids of 20% or less, 19% or less, 18% or less, 17% or less, 16% or less, 15% or less, 14% or less, 13% or less, 12% or less, 11% or less, 10% or less, 9% or less, 8% or less, 7% or less, 6% or less, 5% or less, 4% or less, 3% or less, 2% or less, 1% or less. In some embodiments, a nutritive protein or polypeptide according to the disclosure comprises no amino acids selected from Asn, Arg, Ser, and Thr. In some embodiments a nutritive protein or polypeptide according to the disclosure comprises fewer than 20, fewer than 19, fewer than 18, fewer than 17, fewer than 16, fewer than 15, fewer than 14, fewer than 13, fewer than 12, fewer than 11, fewer than 10, fewer than 9, fewer than 8, fewer than 7, fewer than 6, fewer than 5, fewer than 4, fewer than 3, fewer than 2, fewer than 1, or no amino acids selected from Asn, Arg, Ser, and Thr.

[0155] As used herein, a “stable” protein is one that resists changes (e.g., unfolding, oxidation, aggregation, hydrolysis, etc.) that alter the biophysical (e.g., solubility), biological (e.g., digestibility), or compositional (e.g. proportion of Leucine amino acids) traits of the protein of interest.

[0156] Protein stability can be measured using various assays known in the art and nutritive proteins disclosed herein and having stability above a threshold can be selected. In some embodiments a protein is selected that displays thermal stability that is comparable to or better than that of whey protein. Thermal stability is a property that can help predict the shelf life of a nutritive protein. In some embodiments of the assay stability of nutritive protein samples is determined by monitoring aggregation formation using size exclusion chromatography (SEC) after exposure to extreme temperatures. Aqueous samples of the protein to be tested are placed in a heating block at 90° C. and samples are taken after 0, 1, 5, 10, 30 and 60 min for SEC analysis. Protein is detected by monitoring absorbance at 214 nm, and aggregates are characterized as peaks eluting faster than the protein of interest. No overall change in peak area indicates no precipitation of protein during the heat treatment. Whey protein has been shown to rapidly form ˜80% aggregates when exposed to 90° C. in such an assay.

[0157] In some embodiments the thermal stability of a nutritive protein is determined by heating a sample slowly from 25° C. to 95° C. in presence of a hydrophobic dye (e.g., ProteoStat® Thermal shift stability assay kit, Enzo Life Sciences) that binds to aggregated proteins that are formed as the protein denatures with increasing temperature (Niesen, F. H., Berglund, H. & Vadadi, M., 2007. The use of differential scanning fluorimetry to detect ligand interactions that promote protein stability. Nature Protocols, Volume 2, pp. 2212-2221). Upon binding, the dye's fluorescence increases significantly, which is recorded by an rtPCR instrument and represented as the protein's melting curve (Lavinder, J. J., Hari, S. B., Suillivan, B. J. & Magilery, T. J., 2009. High-Throughput Thermal Scanning: A General, Rapid Dye-Binding Thermal Shift Screen for Protein Engineering. Journal of the American Chemical Society, pp. 3794-3795). After the thermal shift is complete, samples are examined for insoluble precipitates and further analyzed by analytical size exclusion chromatography (SEC).

[0158] In some embodiments a nutritive protein of this disclosure shows resistance to aggregation, exhibiting, for example, less than 80% aggregation, 10% aggregation, or no detectable aggregation at elevated temperatures (e.g, 50° C., 60° C., 70° C., 80° C., 85° C., 90° C., or 95° C.).

[0159] One benefit of stable nutritive proteins as disclosed herein is that they may be able to be stored for an extended period of time before use, in some instances without the need for refrigeration or cooling. In some embodiments, nutritive proteins are processed into a dry form (e.g., by lyophilization). In some embodiments, nutritive proteins are stable upon lyophilization. In some embodiments, such lyophilized nutritive proteins maintain their stability upon reconstitution (e.g., liquid formulation).

[0160] For most embodiments it is preferred that the nutritive protein not exhibit inappropriately high allergenicity. Accordingly, in some embodiments the potential allergenicy of the nutritive protein is assessed. This can be done by any suitable method known in the art. In some embodiments an allergenicity score is calculated. The allergenicity score is a primary sequence based metric based on WHO recommendations (http://www.fao.org/ag/agn/food/pdf/allergygm.pdf) for assessing how similar a protein is to any known allergen, the primary hypothesis being that high percent identity between a target and a known allergen is likely indicative of cross reactivity. For a given protein, the likelihood of eliciting an allergic response can be assessed via one or both of a complimentary pair of sequence homology based tests. The first test determines the protein's percent identity across the entire sequence via a global-global sequence alignment to a database of known allergens using the FASTA algorithm with the BLOSUM50 substitution matrix, a gap open penalty of 10, and a gap extension penalty of 2. It has been suggested that proteins with less than 50% global homology are unlikely to be allergenic (Goodman R. E. et al. Allergenicity assessment of genetically modified crops—what makes sense? Nat. Biotech. 26, 73-81 (2008); Aalberse R. C. Structural biology of allergens. J. Allergy Clin. Immunol. 106, 228-238 (2000)).

[0161] In some embodiments of a nutritive protein, the nutritive protein has less than 50% global homology to any known allergen in the database used for the analysis. In some embodiments a cutoff of less than 40% homology is used. In some embodiments a cutoff of less than 30% homology is used. In some embodiments a cutoff of less than 20% homology is used. In some embodiments a cutoff of less than 10% homology is used. In some embodiments a cutoff of from 40% to 50% is used. In some embodiments a cutoff of from 30% to 50% is used. In some embodiments a cutoff of from 20% to 50% is used. In some embodiments a cutoff of from 10% to 50% is used. In some embodiments a cutoff of from 5% to 50% is used. In some embodiments a cutoff of from 0% to 50% is used. In some embodiments a cutoff of greater than 50% global homology to any known allergen in the database used for the analysis is used. In some embodiments a cutoff of from 50% to 60% is used. In some embodiments a cutoff of from 50% to 70% is used. In some embodiments a cutoff of from 50% to 80% is used. In some embodiments a cutoff of from 50% to 90% is used. In some embodiments a cutoff of from 55% to 60% is used. In some embodiments a cutoff of from 65% to 70% is used. In some embodiments a cutoff of from 70% to 75% is used. In some embodiments a cutoff of from 75% to 80% is used.

[0162] The second test assesses the local allergenicity along the protein sequence by determining the local allergenicity of all possible contiguous 80 amino acid fragments via a global-local sequence alignment of each fragment to a database of known allergens using the FASTA algorithm with the BLOSUM50 substitution matrix, a gap open penalty of 10, and a gap extension penalty of 2. The highest percent identity of any 80 amino acid window with any allergen is taken as the final score for the protein of interest. The WHO guidelines suggest using a 35% identity cutoff with this fragment test. In some embodiments of a nutritive protein, all possible fragments of the nutritive protein have less than 35% local homology to any known allergen in the database used for the analysis using this test. In some embodiments a cutoff of less than 30% homology is used. In some embodiments a cutoff of from 30% to 35% homology is used. In some embodiments a cutoff of from 25% to 30% homology is used. In some embodiments a cutoff of from 20% to 25% homology is used. In some embodiments a cutoff of from 15% to 20% homology is used. In some embodiments a cutoff of from 10% to 15% homology is used. In some embodiments a cutoff of from 5% to 10% homology is used. In some embodiments a cutoff of from 0% to 5% homology is used. In some embodiments a cutoff of greater than 35% homology is used. In some embodiments a cutoff of from 35% to 40% homology is used. In some embodiments a cutoff of from 40% to 45% homology is used. In some embodiments a cutoff of from 45% to 50% homology is used. In some embodiments a cutoff of from 50% to 55% homology is used. In some embodiments a cutoff of from 55% to 60% homology is used. In some embodiments a cutoff of from 65% to 70% homology is used. In some embodiments a cutoff of from 70% to 75% homology is used. In some embodiments a cutoff of from 75% to 80% homology is used.

[0163] Skilled artisans are able to identify and use a suitable database of known allergens for this purpose. In some embodiments the database is custom made by selecting proteins from more than one database source. In some embodiments the custom database comprises pooled allergen lists collected by the Food Allergy Research and Resource Program (http://www.allergenonline.org/), UNIPROT annotations (http://www.uniprot.org/docs/allergen), and the Structural Database of Allergenic Proteins (SDAP, http://fermi.utmb.edu/SDAP/sdap_lnk.html). This database includes all currently recognized allergens by the International Union of Immunological Socieities (IUIS, http://www.allergen.org/) as well as a large number of additional allergens not yet officially named. In some embodiments the database comprises a subset of known allergen proteins available in known databases; that is, the database is a custom selected subset of known allergen proteins. In some embodiments the database of known allergens comprises at least 10 proteins, at least 20 proteins, at least 30 proteins, at least 40 proteins, at least 50 proteins, at least 100, proteins, at least 200 proteins, at least 300 proteins, at least 400 proteins, at least 500 proteins, at least 600 proteins, at least 700 proteins, at least 800 proteins, at least 900 proteins, at least 1,000 proteins, at least 1,100 proteins, at least 1,200 proteins, at least 1,300 proteins, at least 1,400 proteins, at least 1,500 proteins, at least 1,600 proteins, at least 1,700 proteins, at least 1,800 proteins, at least 1,900 proteins, or at least 2,000 proteins. In some embodiments the database of known allergens comprises from 100 to 500 proteins, from 200 to 1,000 proteins, from 500 to 1,000 proteins, from 500 to 1,000 proteins, or from 1,000 to 2,000 proteins.

[0164] In some embodiments all (or a selected subset) of contiguous amino acid windows of different lengths (e.g., 70, 60, 50, 40, 30, 20, 10, 8 or 6 amino acid windows) of a nutritive protein are tested against the allergen database and peptide sequences that have 100% identity, 95% or higher identity, 90% or higher identity, 85% or higher identity, 80% or higher identity, 75% or higher identity, 70% or higher identity, 65% or higher identity, 60% or higher identity, 55% or higher identity, or 50% or higher identity matches are identified for further examination of potential allergenicity.

[0165] Another method of predicting the allergenicity of a protein is to assess the homology of the protein to a protein of human origin. The human immune system is exposed to a multitude of possible allergenic proteins on a regular basis and has the intrinsic ability to differentiate between the host body's proteins and exogenous proteins. The exact nature of this ability is not always clear, and there are many diseases that arise as a result of the failure of the body to differentiate self from non-self (e.g. arthritis). Nonetheless, the fundamental hypothesis is that proteins that share a degree of sequence homology to human proteins are less likely to elicit an immune response. In particular, it has been shown that for some protein families with known allergenic members (tropomyosins, parvalbumins, caseins), those proteins that bear more sequence homology to their human counterparts relative to known allergenic proteins, are not thought to be allergenic (Jenkins J A. et al. Evolutionary distance from human homologs reflects allergenicity of animcal food proteins.J. Allergy Clin Immunol. 120 (2007): 1399-1405). For a given protein, a human homology score is measured by determining the maximum percent identity of the protein to a database of human proteins (e.g., the UNIPROT database) from a global-local alignment using the FASTA algorithm with the BLOSUM50 substitution matrix, a gap open penalty of 10, and a gap extension penalty of 2. According to Jenkins et al. (Jenkins J A. et al. Evolutionary distance from human homologs reflects allergenicity of animal food proteins. J. Allergy Clin Immunol. 120 (2007): 1399-1405) proteins with a sequence identity to a human protein above about 62% are less likely to be allergenic. Skilled artisans are able to identify and use a suitable database of known human proteins for this purpose, for example, by searching the UNIPROT database (http://www.uniprot.org). In some embodiments the database is custom made by selecting proteins from more than one database source. Of course the database may but need not be comprehensive. In some embodiments the database comprises a subset of human proteins; that is, the database is a custom selected subset of human proteins. In some embodiments the database of human proteins comprises at least 10 proteins, at least 20 proteins, at least 30 proteins, at least 40 proteins, at least 50 proteins, at least 100, proteins, at least 200 proteins, at least 300 proteins, at least 400 proteins, at least 500 proteins, at least 600 proteins, at least 700 proteins, at least 800 proteins, at least 900 proteins, at least 1,000 proteins, at least 2,000 proteins, at least 3,000 proteins, at least 4,000 proteins, at least 5,000 proteins, at least 6,000 proteins, at least 7,000 proteins, at least 8,000 proteins, at least 9,000 proteins, or at least 10,000 proteins. In some embodiments the database comprises from 100 to 500 proteins, from 200 to 1,000 proteins, from 500 to 1,000 proteins, from 500 to 1,000 proteins, from 1,000 to 2,000 proteins, from 1,000 to 5,000 proteins, or from 5,000 to 10,000 proteins. In some embodiments the database comprises at least 90%, at least 95%, or at least 99% of all known human proteins.

[0166] In some embodiments of a nutritive protein, the nutritive protein is at least 20% homologous to a human protein. In some embodiments a cutoff of at least 30% homology is used. In some embodiments a cutoff of at least 40% homology is used. In some embodiments a cutoff of at least 50% homology is used. In some embodiments a cutoff of at least 60% homology is used. In some embodiments a cutoff of at least 70% homology is used. In some embodiments a cutoff of at least 80% homology is used. In some embodiments a cutoff of at least 62% homology is used. In some embodiments a cutoff of from at least 20% homology to at least 30% homology is used. In some embodiments a cutoff of from at least 30% homology to at least 40% homology is used. In some embodiments a cutoff of from at least 50% homology to at least 60% homology is used. In some embodiments a cutoff of from at least 60% homology to at least 70% homology is used. In some embodiments a cutoff of from at least 70% homology to at least 80% homology is used.

[0167] For most embodiments it is preferred that the nutritive protein not exhibit inappropriately high toxicity. Accordingly, in some embodiments the potential toxicity of the nutritive protein is assessed. This can be done by any suitable method known in the art. In some embodiments a toxicity score is calculated by determining the protein's percent identity to databases of known toxic proteins (e.g., toxic proteins identified from the UNIPROT database). A global-global alignment of the protein of interest against the database of known toxins is performed using the FASTA algorithm with the BLOSUM50 substitution matrix, a gap open penalty of 10, and a gap extension penalty of 2. In some embodiments of a nutritive protein, the nutritive protein is less than 35% homologous to a known toxin. In some embodiments a cutoff of less than 35% homology is used. In some embodiments a cutoff of from 30% to 35% homology is used. In some embodiments a cutoff of from 25% to 35% homology is used. In some embodiments a cutoff of from 20% to 35% homology is used. In some embodiments a cutoff of from 15% to 35% homology is used. In some embodiments a cutoff of from 10% to 35% homology is used. In some embodiments a cutoff of from 5% to 35% homology is used. In some embodiments a cutoff of from 0% to 35% homology is used. In some embodiments a cutoff of greater than 35% homology is used. In some embodiments a cutoff of from 35% to 40% homology is used. In some embodiments a cutoff of from 35% to 45% homology is used. In some embodiments a cutoff of from 35% to 50% homology is used. In some embodiments a cutoff of from 35% to 55% homology is used. In some embodiments a cutoff of from 35% to 60% homology is used. In some embodiments a cutoff of from 35% to 70% homology is used. In some embodiments a cutoff of from 35% to 75% homology is used. In some embodiments a cutoff of from 35% to 80% homology is used. Skilled artisans are able to identify and use a suitable database of known toxins for this purpose, for example, by searching the UNIPROT database (http://www.uniprot.org). In some embodiments the database is custom made by selecting proteins identified as toxins from more than one database source. In some embodiments the database comprises a subset of known toxic proteins; that is, the database is a custom selected subset of known toxic proteins. In some embodiments the database of toxic proteins comprises at least 10 proteins, at least 20 proteins, at least 30 proteins, at least 40 proteins, at least 50 proteins, at least 100, proteins, at least 200 proteins, at least 300 proteins, at least 400 proteins, at least 500 proteins, at least 600 proteins, at least 700 proteins, at least 800 proteins, at least 900 proteins, at least 1,000 proteins, at least 2,000 proteins, at least 3,000 proteins, at least 4,000 proteins, at least 5,000 proteins, at least 6,000 proteins, at least 7,000 proteins, at least 8,000 proteins, at least 9,000 proteins, or at least 10,000 proteins. In some embodiments the database comprises from 100 to 500 proteins, from 200 to 1,000 proteins, from 500 to 1,000 proteins, from 500 to 1,000 proteins, from 1,000 to 2,000 proteins, from 1,000 to 5,000 proteins, or from 5,000 to 10,000 proteins.

[0168] For some embodiments it is preferred that the nutritive protein not exhibit anti-nutritional activity (“anti-nutricity”), i.e., proteins that have the potential to prevent the absorption of nutrients from food. Examples of anti-nutritive factors include protease inhibitors, which inhibit the actions of trypsin, pepsin and other proteases in the gut, preventing the digestion and subsequent absorption of protein. Accordingly, in some embodiments the potential anti-nutricity of the nutritive protein is assessed. This can be done by any suitable method known in the art. In some embodiments an anti-nutricity score is calculated by determining the protein's percent identity to databases of known protease inhibitors (e.g., protease inhibitors identified from the UNIPROT database). A global-global alignment of the protein of interest against the database of known protease inhibitors is performed using the FASTA algorithm with the BLOSUM50 substitution matrix, a gap open penalty of 10, and a gap extension penalty of 2, to identify whether the nutritive protein is homologous to a known anti-nutritive protein. In some embodiments of a nutritive protein, the nutritive protein has less than 35% global homology to any known anti-nutritive protein (e.g., any known protease inhibitor) in the database used for the analysis. In some embodiments a cutoff of less than 35% identify is used. In some embodiments a cutoff of from 30% to 35% is used. In some embodiments a cutoff of from 25% to 35% is used. In some embodiments a cutoff of from 20% to 35% is used. In some embodiments a cutoff of from 15% to 35% is used. In some embodiments a cutoff of from 10% to 35% is used. In some embodiments a cutoff of from 5% to 35% is used. In some embodiments a cutoff of from 0% to 35% is used. In some embodiments a cutoff of greater than 35% identify is used. In some embodiments a cutoff of from 35% to 40% is used. In some embodiments a cutoff of from 35% to 45% is used. In some embodiments a cutoff of from 35% to 50% is used. In some embodiments a cutoff of from 35% to 55% is used. In some embodiments a cutoff of from 35% to 60% is used. In some embodiments a cutoff of from 35% to 70% is used. In some embodiments a cutoff of from 35% to 75% is used. In some embodiments a cutoff of from 35% to 80% is used. Skilled artisans are able to identify and use a suitable database of known protease inhibitors for this purpose, for example, by searching the UNIPROT database (http://www.uniprot.org). In some embodiments the database is custom made by selecting proteins identified protease-inhibitors as from more than one database source. In some embodiments the database comprises a subset of known protease inhibitors available in databases; that is, the database is a custom selected subset of known protease inhibitor proteins. In some embodiments the database of known protease inhibitor proteins comprises at least 10 proteins, at least 20 proteins, at least 30 proteins, at least 40 proteins, at least 50 proteins, at least 100, proteins, at least 200 proteins, at least 300 proteins, at least 400 proteins, at least 500 proteins, at least 600 proteins, at least 700 proteins, at least 800 proteins, at least 900 proteins, at least 1,000 proteins, at least 1,100 proteins, at least 1,200 proteins, at least 1,300 proteins, at least 1,400 proteins, at least 1,500 proteins, at least 1,600 proteins, at least 1,700 proteins, at least 1,800 proteins, at least 1,900 proteins, or at least 2,000 proteins. In some embodiments the database of known protease inhibitor proteins comprises from 100 to 500 proteins, from 200 to 1,000 proteins, from 500 to 1,000 proteins, from 500 to 1,000 proteins, or from 1,000 to 2,000 proteins, or from 2,000 to 3,000 proteins.

[0169] In other embodiments a nutritive protein that does exhibit some degree of protease inhibitor activity is used. For example, in some embodiments such a protein may be useful because it delays protease digestion when the nuttirive protein is consumed such that the nutritive protein traveres a greater distance within the GI tract before it is digested, thus delaying absorption. For example, in some embodiments the nutritive protein inhibits gastric digestion but not intestinal digestion.

[0170] Delaney B. et al. (Evaluation of protein safety in the context of agricultural biotechnology. Food. Chem. Toxicol. 46 (2008: S71-S97)) suggests that one should avoid both known toxic and anti-nutritive proteins when assessing the safety of a possible food protein. In some embodiments of a nutritive protein, the nutritive protein has a favorably low level of global homology to a database of known toxic proteins and/or a favorably low level of global homology to a database of known anti-nutricity proteins (e.g., protease inhibitors), as defined herein.

[0171] Certain free amino acids and mixtures of free amino acids are known to have a bitter or otherwise unpleasant taste. In addition, hydrolysates of common proteins (e.g., whey and soy) often have a bitter or unpleasant taste. In some embodiments, nutritive proteins disclosed and described herein do not have a bitter or otherwise unpleasant taste. In some embodiments, nutritive proteins disclosed and described herein have a more acceptable taste as compared to at least one of free amino acids, mixtures of free amino acids, and/or protein hydrolysates. In some embodiments, nutritive proteins disclosed and described herein have a taste that is equal to or exceeds at least one of whey protein.

[0172] Proteins are known to have tastes covering the five established taste modalities: sweet, sour, bitter, salty and umami. The taste of a particular protein (or its lack thereof) can be attributed to several factors, including the primary structure, the presence of charged side chains, and the electronic and conformational features of the protein. In some embodiments, nutritive proteins disclosed and described herein are designed to have a desired taste (e.g., sweet, salty, umami) and/or not to have an undesired taste (e.g., bitter, sour). In this context “design” includes, for example, selecting naturally occurring proteins embodying features that achieve the desired taste property, as well as creating muteins of naturally-occurring proteins that have desired taste properties. For example, nutritive proteins can be designed to interact with specific taste receptors, such as sweet receptors (T1R2-T1R3 heterodimer) or umami receptors (T1R1-T1R3 heterodimer, mGluR4, and/or mGluR1). Further, nutritive proteins may be designed not to interact, or to have diminished interaction, with other taste receptors, such as bitter receptors (T2R receptors).

[0173] Nutritive proteins disclosed and described herein can also elicit different physical sensations in the mouth when ingested, sometimes referred to as “mouth feel”. The mouth feel of the nutritive proteins may be due to one or more factors including primary structure, the presence of charged side chains, and the electronic and conformational features of the protein. In some embodiments, nutritive proteins elicit a buttery or fat-like mouth feel when ingested.

[0174] In some embodiments the nutritive protein comprises from 20 to 5,000 amino acids, from 20-2,000 amino acids, from 20-1,000 amino acids, from 20-500 amino acids, from 20-250 amino acids, from 20-200 amino acids, from 20-150 amino acids, from 20-100 amino acids, from 20-40 amino acids, from 30-50 amino acids, from 40-60 amino acids, from 50-70 amino acids, from 60-80 amino acids, from 70-90 amino acids, from 80-100 amino acids, at least 25 amino acids, at least 30 amino acids, at least 35 amino acids, at least 40 amino acids, at least 2455 amino acids, at least 50 amino acids, at least 55 amino acids, at least 60 amino acids, at least 65 amino acids, at least 70 amino acids, at least 75 amino acids, at least 80 amino acids, at least 85 amino acids, at least 90 amino acids, at least 95 amino acids, at least 100 amino acids, at least 105 amino acids, at least 110 amino acids, at least 115 amino acids, at least 120 amino acids, at least 125 amino acids, at least 130 amino acids, at least 135 amino acids, at least 140 amino acids, at least 145 amino acids, at least 150 amino acids, at least 155 amino acids, at least 160 amino acids, at least 165 amino acids, at least 170 amino acids, at least 175 amino acids, at least 180 amino acids, at least 185 amino acids, at least 190 amino acids, at least 195 amino acids, at least 200 amino acids, at least 205 amino acids, at least 210 amino acids, at least 215 amino acids, at least 220 amino acids, at least 225 amino acids, at least 230 amino acids, at least 235 amino acids, at least 240 amino acids, at least 245 amino acids, or at least 250 amino acids. In some embodiments the nutritive protein consists of from 20 to 5,000 amino acids, from 20-2,000 amino acids, from 20-1,000 amino acids, from 20-500 amino acids, from 20-250 amino acids, from 20-200 amino acids, from 20-150 amino acids, from 20-100 amino acids, from 20-40 amino acids, from 30-50 amino acids, from 40-60 amino acids, from 50-70 amino acids, from 60-80 amino acids, from 70-90 amino acids, from 80-100 amino acids, at least 25 amino acids, at least 30 amino acids, at least 35 amino acids, at least 40 amino acids, at least 2455 amino acids, at least 50 amino acids, at least 55 amino acids, at least 60 amino acids, at least 65 amino acids, at least 70 amino acids, at least 75 amino acids, at least 80 amino acids, at least 85 amino acids, at least 90 amino acids, at least 95 amino acids, at least 100 amino acids, at least 105 amino acids, at least 110 amino acids, at least 115 amino acids, at least 120 amino acids, at least 125 amino acids, at least 130 amino acids, at least 135 amino acids, at least 140 amino acids, at least 145 amino acids, at least 150 amino acids, at least 155 amino acids, at least 160 amino acids, at least 165 amino acids, at least 170 amino acids, at least 175 amino acids, at least 180 amino acids, at least 185 amino acids, at least 190 amino acids, at least 195 amino acids, at least 200 amino acids, at least 205 amino acids, at least 210 amino acids, at least 215 amino acids, at least 220 amino acids, at least 225 amino acids, at least 230 amino acids, at least 235 amino acids, at least 240 amino acids, at least 245 amino acids, or at least 250 amino acids.

### B. Nucleic Acids

[0175] Also provided herein are nucleic acids encoding nutritive polypeptides or proteins. In some embodiments the nucleic acid is isolated. In some embodiments the nucleic acid is purified.

[0176] In some embodiments of the nucleic acid, the nucleic acid comprises a nucleic acid sequence that encodes a first polypeptide sequence disclosed in Section A above. In some embodiments of the nucleic acid, the nucleic acid consists of a nucleic acid sequence that encodes a first polypeptide sequence disclosed in Section A above. In some embodiments of the nucleic acid, the nucleic acid comprises a nucleic acid sequence that encodes a nutritive protein disclosed in Section A above. In some embodiments of the nucleic acid, the nucleic acid consists of a nucleic acid sequence that encodes a nutritive protein disclosed in Section A above. In some embodiments of the nucleic acid the nucleic acid sequence that encodes the first polypeptide sequence is operatively linked to at least one expression control sequence. For example, in some embodiments of the nucleic acid the nucleic acid sequence that encodes the first polypeptide sequence is operatively linked to a promoter such as a promoter described in Section D below.

[0177] Accordingly, in some embodiments the nucleic acid molecule of this disclosure encodes a polypeptide or protein that itself is a nutritive polypeptide or protein. Such a nucleic acid molecule may be referred to as a “nutritive nucleic acid”. In some embodiments the nutritive nucleic acid encodes a polypeptide or protein that itself comprises at least one of: a) a ratio of branch chain amino acid residues to total amino acid residues of at least 24%; b) a ratio of Leu residues to total amino acid residues of at least 11%; and c) a ratio of essential amino acid residues to total amino acid residues of at least 49%. In some embodiments the nutritive nucleic acid comprises at least 10 nucleotides, at least 20 nucleotides, at least 30 nucleotides, at least 40 nucleotides, at least 50 nucleotides, at least 60 nucleotides, at least 70 nucleotides, at least 80 nucleotides, at least 90 nucleotides, at least 100 nucleotides, at least 200 nucleotides, at least 300 nucleotides, at least 400 nucleotides, at least 500 nucleotides, at least 600 nucleotides, at least 700 nucleotides, at least 800 nucleotides, at least 900 nucleotides, at least 1,000 nucleotides. In some embodiments the nutritive nucleic acid comprises from 10 to 100 nucleotides, from 20 to 100 nucleotides, from 10 to 50 nucleotides, or from 20 to 40 nucleotides In some embodiments the nutritive nucleic acid comprises all or part of an open reading frame that encodes a naturally occurring nutritive polypeptide or protein. In some embodiments the nutritive nucleic acid consists of an open reading frame that encodes a fragment of a naturally occurring nutritive protein, wherein the open reading frame does not encode the complete naturally occurring nutritive protein.

[0178] In some embodiments the nutritive nucleic acid is a cDNA.

[0179] In some embodiments nucleic acid molecules are provided that comprise a sequence that is at least 50%, 60%, 70%, 80%, 85%, 90%, 95%, 96%, 97%, 98%, 99%, or 99.9% identical to a naturally occurring nutritive nucleic acid. In some embodiments nucleic acids are provided that hybridize under stringent hybridization conditions with at least one reference nutritive nucleic acid.

[0180] The nutritive nucleic acids and fragments thereof provided in this disclosure display utility in a variety of systems and methods. For example, the fragments may be used as probes in various hybridization techniques. Depending on the method, the target nucleic acid sequences may be either DNA or RNA. The target nucleic acid sequences may be fractionated (e.g., by gel electrophoresis) prior to the hybridization, or the hybridization may be performed on samples in situ. One of skill in the art will appreciate that nucleic acid probes of known sequence find utility in determining chromosomal structure (e.g., by Southern blotting) and in measuring gene expression (e.g., by Northern blotting). In such experiments, the sequence fragments are preferably detectably labeled, so that their specific hydridization to target sequences can be detected and optionally quantified. One of skill in the art will appreciate that the nucleic acid fragments of this disclosure may be used in a wide variety of blotting techniques not specifically described herein.

[0181] It should also be appreciated that the nucleic acid sequence fragments disclosed herein also find utility as probes when immobilized on microarrays. Methods for creating microarrays by deposition and fixation of nucleic acids onto support substrates are well known in the art. Reviewed in DNA Microarrays: A Practical Approach (Practical Approach Series), Schena (ed.), Oxford University Press (1999) (ISBN: 0199637768); Nature Genet. 21(1)(suppl):1-60 (1999); Microarray Biochip: Tools and Technology, Schena (ed.), Eaton Publishing Company/BioTechniques Books Division (2000) (ISBN: 1881299376), the disclosures of which are incorporated herein by reference in their entireties. Analysis of, for example, gene expression using microarrays comprising nucleic acid sequence fragments, such as the nucleic acid sequence fragments disclosed herein, is a well-established utility for sequence fragments in the field of cell and molecular biology. Other uses for sequence fragments immobilized on microarrays are described in Gerhold et al., Trends Biochem. Sci. 24:168-173 (1999) and Zweiger, Trends Biotechnol. 17:429-436 (1999); DNA Microarrays: A Practical Approach (Practical Approach Series), Schena (ed.), Oxford University Press (1999) (ISBN: 0199637768); Nature Genet. 21(1)(suppl):1-60 (1999); Microarray Biochip: Tools and Technology, Schena (ed.), Eaton Publishing Company/BioTechniques Books Division (2000) (ISBN: 1881299376).

### C. Vectors

[0182] Also provided are vectors, including expression vectors, which comprise at least one of the nucleic acid molecules disclosed herein, as described further herein. In some embodiments, the vectors comprise at least one isolated nucleic acid molecule encoding a nutritive protein as disclosed herein. In alternative embodiments, the vectors comprise such a nucleic acid molecule operably linked to one or more expression control sequence. The vectors can thus be used to express at least one recombinant protein in a recombinant microbial host cell.

[0183] Suitable vectors for expression of nucleic acids in microorganisms are well known to those of skill in the art. Suitable vectors for use in cyanobacteria are described, for example, in Heidorn et al., “Synthetic Biology in Cyanobacteria: Engineering and Analyzing Novel Functions,” Methods in Enzymology, Vol. 497, Ch. 24 (2011). Exemplary replicative vectors that can be used for engineering cyanobacteria as disclosed herein include pPMQAK1, pSL1211, pFC1, pSB2A, pSCR119/202, pSUN119/202, pRL2697, pRL25C, pRL1050, pSG111M, and pPBH201.

[0184] Other vectors such as pJB 161 which are capable of receiving nucleic acid sequences disclosed herein may also be used. Vectors such as pJB161 comprise sequences which are homologous with sequences present in plasmids endogenous to certain photosynthetic microorganisms (e.g., plasmids pAQ1, pAQ3, and pAQ4 of certain Synechococcus species). Examples of such vectors and how to use them is known in the art and provided, for example, in Xu et al., “Expression of Genes in Cyanobacteria: Adaptation of Endogenous Plasmids as Platforms for High-Level Gene Expression in Synechococcus sp. PCC 7002,” Chapter 21 in Robert Carpentier (ed.), “Photosynthesis Research Protocols,” Methods in Molecular Biology, Vol. 684, 2011, which is hereby incorporated herein by reference. Recombination between pJB 161 and the endogenous plasmids in vivo yield engineered microbes expressing the genes of interest from their endogenous plasmids. Alternatively, vectors can be engineered to recombine with the host cell chromosome, or the vector can be engineered to replicate and express genes of interest independent of the host cell chromosome or any of the host cell's endogenous plasmids.

[0185] A further example of a vector suitable for recombinant protein production is the pET system (Novagen®). This system has been extensively characterized for use in E. coli and other microorganisms. In this system, target genes are cloned in pET plasmids under control of strong bacteriophage T7 transcription and (optionally) translation signals; expression is induced by providing a source of T7 RNA polymerase in the host cell. T7 RNA polymerase is so selective and active that, when fully induced, almost all of the microorganism's resources are converted to target gene expression; the desired product can comprise more than 50% of the total cell protein a few hours after induction. It is also possible to attenuate the expression level simply by lowering the concentration of inducer. Decreasing the expression level may enhance the soluble yield of some target proteins. In some embodiments this system also allows for maintenance of target genes in a transcriptionally silent un-induced state.

[0186] In some embodiments of using this system, target genes are cloned using hosts that do not contain the T7 RNA polymerase gene, thus alleviating potential problems related to plasmid instability due to the production of proteins potentially toxic to the host cell. Once established in a non-expression host, target protein expression may be initiated either by infecting the host with λCE6, a phage that carries the T7 RNA polymerase gene under the control of the λ pL and pI promoters, or by transferring the plasmid into an expression host containing a chromosomal copy of the T7 RNA polymerase gene under lacUV5 control. In the second case, expression is induced by the addition of IPTG or lactose to the bacterial culture or using an autoinduction medium. Other plasmids systems that are controlled by the lac operator, but do not require the T7 RNA polymerase gene and rely upon E. coli's native RNA polymerase include the pTrc plasmid suite (Invitrogen) or pQE plamid suite (QIAGEN).

[0187] In other embodiments it is possible to clone directly into expression hosts. Two types of T7 promoters and several hosts that differ in their stringency of suppressing basal expression levels are available, providing great flexibility and the ability to optimize the expression of a wide variety of target genes.

[0188] Suitable vectors for expression of nucleic acids in mammalian cells typically comprise control functions provided by viral regulatory elements. For example, commonly used promoters are derived from polyoma virus, Adenovirus 2, cytomegalovirus, or Simian Virus 40.

### D. Promoters

[0189] Promoters useful for expressing the recombinant genes described herein include both constitutive and inducible/repressible promoters. Examples of inducible/repressible promoters include nickel-inducible promoters (e.g., PnrsA, PnrsB; see, e.g., Lopez-Mauy et al., Cell (2002) v.43: 247-256) and urea repressible promoters such as PnirA (described in, e.g., Qi et al., Applied and Environmental Microbiology (2005) v.71: 5678-5684). Additional examples of inducible/repressible promoters include PnirA (promoter that drives expression of the nirA gene, induced by nitrate and repressed by urea) and Psuf (promoter that drives expression of the sufB gene, induced by iron stress). Examples of constitutive promoters include Pcpc (promoter that drives expression of the cpc operon), Prbc (promoter that drives expression of rubisco), PpsbAII (promoter that drives expression of PpsbAII), Pcro (lambda phage promoter that drives expression of cro). In other embodiments, a PaphII and/or a laclq-Ptrc promoter can used to control expression. Where multiple recombinant genes are expressed in an engineered microorganim, the different genes can be controlled by different promoters or by identical promoters in separate operons, or the expression of two or more genes may be controlled by a single promoter as part of an operon.

[0190] Further non-limiting examples of inducible promoters may include, but are not limited to, those induced by expression of an exogenous protein (e.g., T7 RNA polymerase, SP6 RNA polymerase), by the presence of a small molecule (e.g., IPTG, galactose, tetracycline, steroid hormone, abscisic acid), by absence of small molecules (e.g., CO₂, iron, nitrogen), by metals or metal ions (e.g., copper, zinc, cadmium, nickel), and by environmental factors (e.g., heat, cold, stress, light, darkness), and by growth phase. In some embodiments, the inducible promoter is tightly regulated such that in the absence of induction, substantially no transcription is initiated through the promoter. In some embodiments, induction of the promoter does not substantially alter transcription through other promoters. Also, generally speaking, the compound or condition that induces an inducible promoter is not be naturally present in the organism or environment where expression is sought.

[0191] In some embodiments, the inducible promoter is induced by limitation of CO₂ supply to a cyanobacteria culture. By way of non-limiting example, the inducible promoter may be the promoter sequence of Synechocystis PCC 6803 that are up-regulated under the CO₂-limitation conditions, such as the cmp genes, ntp genes, ndh genes, sbt genes, chp genes, and rbc genes, or a variant or fragment thereof.

[0192] In some embodiments, the inducible promoter is induced by iron starvation or by entering the stationary growth phase. In some embodiments, the inducible promoter may be variant sequences of the promoter sequence of cyanobacterial genes that are up-regulated under Fe-starvation conditions such as isiA, or when the culture enters the stationary growth phase, such as isiA, phrA, sigC, sigB, and sigH genes, or a variant or fragment thereof.

[0193] In some embodiments, the inducible promoter is induced by a metal or metal ion. By way of non-limiting example, the inducible promoter may be induced by copper, zinc, cadmium, mercury, nickel, gold, silver, cobalt, and bismuth or ions thereof. In some embodiments, the inducible promoter is induced by nickel or a nickel ion. In some embodiments, the inducible promoter is induced by a nickel ion, such as Ni²⁺. In another exemplary embodiment, the inducible promoter is the nickel inducible promoter from Synechocystis PCC 6803. In another embodiment, the inducible promoter may be induced by copper or a copper ion. In yet another embodiment, the inducible promoter may be induced by zinc or a zinc ion. In still another embodiment, the inducible promoter may be induced by cadmium or a cadmium ion. In yet still another embodiment, the inducible promoter may be induced by mercury or a mercury ion. In an alternative embodiment, the inducible promoter may be induced by gold or a gold ion. In another alternative embodiment, the inducible promoter may be induced by silver or a silver ion. In yet another alternative embodiment, the inducible promoter may be induced by cobalt or a cobalt ion. In still another alternative embodiment, the inducible promoter may be induced by bismuth or a bismuth ion.

[0194] In some embodiments, the promoter is induced by exposing a cell comprising the inducible promoter to a metal or metal ion. The cell may be exposed to the metal or metal ion by adding the metal to the microbial growth media. In certain embodiments, the metal or metal ion added to the microbial growth media may be efficiently recovered from the media. In other embodiments, the metal or metal ion remaining in the media after recovery does not substantially impede downstream processing of the media or of the bacterial gene products.

[0195] Further non-limiting examples of constitutive promoters include constitutive promoters from Gram-negative bacteria or a bacteriophage propagating in a Gram-negative bacterium. For instance, promoters for genes encoding highly expressed Gram-negative gene products may be used, such as the promoter for Lpp, OmpA, rRNA, and ribosomal proteins. Alternatively, regulatable promoters may be used in a strain that lacks the regulatory protein for that promoter. For instance P_{lac}, P_{tac}, and P_{trc}, may be used as constitutive promoters in strains that lack Lac1. Similarly, P22 P_{R} and P_{L} may be used in strains that lack the lambda C2 repressor protein, and lambda P_{R} and P_{L} may be used in strains that lack the lambda C1 repressor protein. In one embodiment, the constitutive promoter is from a bacteriophage. In another embodiment, the constitutive promoter is from a Salmonella bacteriophage. In yet another embodiment, the constitutive promoter is from a cyanophage. In some embodiments, the constitutive promoter is a Synechocystis promoter. For instance, the constitutive promoter may be the PpsbAll promoter or its variant sequences, the Prbc promoter or its variant sequences, the P_{cpc} promoter or its variant sequences, and the PrnpB promoter or its variant sequences.

### E. Host Cells

[0196] Also provided are host cells transformed with the nucleic acid molecules or vectors disclosed herein, and descendants thereof. In some embodiments the host cells are microbial cells. In some embodiments, the host cells carry the nucleic acid sequences on vectors, which may but need not be freely replicating vectors. In other embodiments, the nucleic acids have been integrated into the genome of the host cells and/or into an endogenous plasmid of the host cells. The transformed host cells find use, e.g., in the production of recombinant nutritive proteins disclosed herein.

[0197] “Microorganisms” includes prokaryotic and eukaryotic microbial species from the Domains Archaea, Bacteria and Eucarya, the latter including yeast and filamentous fungi, protozoa, algae, or higher Protista. The terms “microbial cells” and “microbes” are used interchangeably with the term microorganism.

[0198] A variety of host microorganisms may be transformed with a nucleic acid sequence disclosed herein and may in some embodiments be used to produce a recombinant nutritive protein disclosed herein. Suitable host microorganisms include both autotrophic and heterotrophic microbes. In some applications the autotrophic microorganisms allows for a reduction in the fossil fuel and/or electricity inputs required to make a nutritive protein encoded by a recombinant nucleic acid sequence introduced into the host microorganism. This, in turn, in some applications reduces the cost and/or the environmental impact of producing the nutritive protein and/or reduces the cost and/or the environmental impact in comparison to the cost and/or environmental impact of manufacturing alternative nutritive proteins, such as whey, egg, and soy. For example, the cost and/or environmental impact of making a nutritive protein disclosed herein using a host microorganism as disclosed herein is in some embodiments lower that the cost and/or environmental impact of making whey protein in a form suitable for human consumption by processing of cows milk.

[0199] Non-limiting examples of heterotrophs include Escherichia coli, Salmonella typhimurium, Bacillus subtilis, Bacillus megaterium, Corynebacterium glutamicum, Streptomyces coelicolor, Streptomyces lividans, Streptomyces vanezuelae, Streptomyces roseosporus, Streptomyces fradiae, Streptomyces griseus, Streptomyces calvuligerus, Streptomyces hygroscopicus, Streptomyces platensis, Saccharopolyspora erythraea, Corynebacterium glutamicum, Aspergillus niger, Aspergillus nidulans, Aspergillus oryzae, Aspergillus terreus, Aspergillus sojae, Penicillium chrysogenum, Trichoderma reesei, Clostridium acetobutylicum, Clostridium beijerinckii, Clostridium thermocellum, Fusibacter paucivorans, Saccharomyces cerevisiae, Saccharomyces boulardii, Pichia pastoris, and Pichia stipitis.

[0200] Photoautotrophic microrganisms include eukaryotic algae, as well as prokaryotic cyanobacteria, green-sulfur bacteria, green non-sulfur bacteria, purple sulfur bacteria, and purple non-sulfur bacteria.

[0201] Extremophiles are also contemplated as suitable organisms. Such organisms withstand various environmental parameters such as temperature, radiation, pressure, gravity, vacuum, desiccation, salinity, pH, oxygen tension, and chemicals. They include hyperthermophiles, which grow at or above 80° C. such as Pyrolobus fumarii; thermophiles, which grow between 60-80° C. such as Synechococcus lividis; mesophiles, which grow between 15-60° C.; and psychrophiles, which grow at or below 15° C. such as Psychrobacter and some insects. Radiation tolerant organisms include Deinococcus radiodurans. Pressure-tolerant organisms include piezophiles, which tolerate pressure of 130 MPa. Weight-tolerant organisms include barophiles. Hypergravity (e.g., >1 g) hypogravity (e.g., <1 g) tolerant organisms are also contemplated. Vacuum tolerant organisms include tardigrades, insects, microbes and seeds. Dessicant tolerant and anhydrobiotic organisms include xerophiles such as Artemia salina; nematodes, microbes, fungi and lichens. Salt-tolerant organisms include halophiles (e.g., 2-5 M NaCl) Halobacteriacea and Dunaliella salina. pH-tolerant organisms include alkaliphiles such as Natronobacterium, Bacillus firmus OF4, Spirulina spp. (e.g., pH >9) and acidophiles such as Cyanidium caldarium, Ferroplasma sp. (e.g., low pH). Anaerobes, which cannot tolerate O₂ such as Methanococcus jannaschii; microaerophils, which tolerate some O₂ such as Clostridium and aerobes, which require O₂ are also contemplated. Gas-tolerant organisms, which tolerate pure CO₂ include Cyanidium caldarium and metal tolerant organisms include metalotolerants such as Ferroplasma acidarmanus (e.g., Cu, As, Cd, Zn), Ralstonia sp. CH34 (e.g., Zn, Co, Cd, Hg, Pb). Gross, Michael. Life on the Edge: Amazing Creatures Thriving in Extreme Environments. New York: Plenum (1998) and Seckbach, J. “Search for Life in the Universe with Terrestrial Microbes Which Thrive Under Extreme Conditions.” In Cristiano Batalli Cosmovici, Stuart Bowyer, and Dan Wertheimer, eds., Astronomical and Biochemical Origins and the Search for Life in the Universe, p. 511. Milan: Editrice Compositori (1997).

[0202] Mixotrophic organisms are also suitable organisms. Mixotrophic organisms can utilize a mix of different sources of energy and carbon, for example, photo- and chemotrophy, litho- and organotrophy, auto- and heterotrophy, and combinations thereof or a combination of it. Mixotrophs can be either eukaryotic or prokaryotic. Additionally, mixotrophs can be obligate or facultative. Suitable mixotrophic organisms include mixotrophic algae and mixotrophic bacteria.

[0203] Algae and cyanobacteria include but are not limited to the following genera: Acanthoceras, Acanthococcus, Acaryochloris, Achnanthes, Achnanthidium, Actinastrum, Actinochloris, Actinocyclus, Actinotaenium, Amphichrysis, Amphidinium, Amphikrikos, Amphipleura, Amphiprora, Amphithrix, Amphora, Anabaena, Anabaenopsis, Aneumastus, Ankistrodesmus, Ankyra, Anomoeoneis, Apatococcus, Aphanizomenon, Aphanocapsa, Aphanochaete, Aphanothece, Apiocystis, Apistonema, Arthrodesmus, Artherospira, Ascochloris, Asterionella, Asterococcus, Audouinella, Aulacoseira, Bacillaria, Balbiania, Bambusina, Bangia, Basichlamys, Batrachospermum, Binuclearia, Bitrichia, Blidingia, Botrdiopsis, Botrydium, Botryococcus, Botryosphaerella, Brachiomonas, Brachysira, Brachytrichia, Brebissonia, Bulbochaete, Bumilleria, Bumilleriopsis, Caloneis, Calothrix, Campylodiscus, Capsosiphon, Carteria, Catena, Cavinula, Centritractus, Centronella, Ceratium, Chaetoceros, Chaetochloris, Chaetomorpha, Chaetonella, Chaetonema, Chaetopeltis, Chaetophora, Chaetosphaeridium, Chamaesiphon, Chara, Characiochloris, Characiopsis, Characium, Charales, Chilomonas, Chlainomonas, Chlamydoblepharis, Chlamydocapsa, Chlamydomonas, Chlamydomonopsis, Chlamydomyxa, Chlamydonephris, Chlorangiella, Chlorangiopsis, Chlorella, Chlorobotrys, Chlorobrachis, Chlorochytrium, Chlorococcum, Chlorogloea, Chlorogloeopsis, Chlorogonium, Chlorolobion, Chloromonas, Chlorophysema, Chlorophyta, Chlorosaccus, Chlorosarcina, Choricystis, Chromophyton, Chromulina, Chroococcidiopsis, Chroococcus, Chroodactylon, Chroomonas, Chroothece, Chrysamoeba, Chrysapsis, Chrysidiastrum, Chrysocapsa, Chrysocapsella, Chrysochaete, Chrysochromulina, Chrysococcus, Chrysocrinus, Chrysolepidomonas, Chrysolykos, Chrysonebula, Chrysophyta, Chrysopyxis, Chrysosaccus, Chrysophaerella, Chrysostephanosphaera, Clodophora, Clastidium, Closteriopsis, Closterium, Coccomyxa, Cocconeis, Coelastrella, Coelastrum, Coelosphaerium, Coenochloris, Coenococcus, Coenocystis, Colacium, Coleochaete, Collodictyon, Compsogonopsis, Compsopogon, Conjugatophyta, Conochaete, Coronastrum, Cosmarium, Cosmioneis, Cosmocladium, Crateriportula, Craticula, Crinalium, Crucigenia, Crucigeniella, Cryptoaulax, Cryptomonas, Cryptophyta, Ctenophora, Cyanodictyon, Cyanonephron, Cyanophora, Cyanophyta, Cyanothece, Cyanothomonas, Cyclonexis, Cyclostephanos, Cyclotella, Cylindrocapsa, Cylindrocystis, Cylindrospermum, Cylindrotheca, Cymatopleura, Cymbella, Cymbellonitzschia, Cystodinium Dactylococcopsis, Debarya, Denticula, Dermatochrysis, Dermocarpa, Dermocarpella, Desmatractum, Desmidium, Desmococcus, Desmonema, Desmosiphon, Diacanthos, Diacronema, Diadesmis, Diatoma, Diatomella, Dicellula, Dichothrix, Dichotomococcus, Dicranochaete, Dictyochloris, Dictyococcus, Dictyosphaerium, Didymocystis, Didymogenes, Didymosphenia, Dilabifilum, Dimorphococcus, Dinobryon, Dinococcus, Diplochloris, Diploneis, Diplostauron, Distrionella, Docidium, Draparnaldia, Dunaliella, Dysmorphococcus, Ecballocystis, Elakatothrix, Ellerbeckia, Encyonema, Enteromorpha, Entocladia, Entomoneis, Entophysalis, Epichrysis, Epipyxis, Epithemia, Eremosphaera, Euastropsis, Euastrum, Eucapsis, Eucocconeis, Eudorina, Euglena, Euglenophyta, Eunotia, Eustigmatophyta, Eutreptia, Fallacia, Fischerella, Fragilaria, Fragilariforma, Franceia, Frustulia, Curcilla, Geminella, Genicularia, Glaucocystis, Glaucophyta, Glenodiniopsis, Glenodinium, Gloeocapsa, Gloeochaete, Gloeochrysis, Gloeococcus, Gloeocystis, Gloeodendron, Gloeomonas, Gloeoplax, Gloeothece, Gloeotila, Gloeotrichia, Gloiodictyon, Golenkinia, Golenkiniopsis, Gomontia, Gomphocymbella, Gomphonema, Gomphosphaeria, Gonatozygon, Gongrosia, Gongrosira, Goniochloris, Gonium, Gonyostomum, Granulochloris, Granulocystopsis, Groenbladia, Gymnodinium, Gymnozyga, Gyrosigma, Haematococcus, Hafniomonas, Hallassia, Hammatoidea, Hannaea, Hantzschia, Hapalosiphon, Haplotaenium, Haptophyta, Haslea, Hemidinium, Hemitoma, Heribaudiella, Heteromastix, Heterothrix, Hibberdia, Hildenbrandia, Hillea, Holopedium, Homoeothrix, Hormanthonema, Hormotila, Hyalobrachion, Hyalocardium, Hyalodiscus, Hyalogonium, Hyalotheca, Hydrianum, Hydrococcus, Hydrocoleum, Hydrocoryne, Hydrodictyon, Hydrosera, Hydrurus, Hyella, Hymenomonas, Isthmochloron, Johannesbaptistia, Juranyiella, Karayevia, Kathablepharis, Katodinium, Kephyrion, Keratococcus, Kirchneriella, Klebsormidium, Kolbesia, Koliella, Komarekia, Korshikoviella, Kraskella, Lagerheimia, Lagynion, Lamprothamnium, Lemanea, Lepocinclis, Leptosira, Lobococcus, Lobocystis, Lobomonas, Luticola, Lyngbya, Malleochloris, Mallomonas, Mantoniella, Marssoniella, Martyana, Mastigocoleus, Gastogloia, Melosira, Merismopedia, Mesostigma, Mesotaenium, Micractinium, Micrasterias, Microchaete, Microcoleus, Microcystis, Microglena, Micromonas, Microspora, Microthamnion, Mischococcus, Monochrysis, Monodus, Monomastix, Monoraphidium, Monostroma, Mougeotia, Mougeotiopsis, Myochloris, Myromecia, Myxosarcina, Naegeliella, Nannochloris, Nautococcus, Navicula, Neglectella, Neidium, Nephroclamys, Nephrocytium, Nephrodiella, Nephroselmis, Netrium, Nitella, Nitellopsis, Nitzschia, Nodularia, Nostoc, Ochromonas, Oedogonium, Oligochaetophora, Onychonema, Oocardium, Oocystis, Opephora, Ophiocytium, Orthoseira, Oscillatoria, Oxyneis, Pachycladella, Palmella, Palmodictyon, Pnadorina, Pannus, Paralia, Pascherina, Paulschulzia, Pediastrum, Pedinella, Pedinomonas, Pedinopera, Pelagodictyon, Penium, Peranema, Peridiniopsis, Peridinium, Peronia, Petroneis, Phacotus, Phacus, Phaeaster, Phaeodermatium, Phaeophyta, Phaeosphaera, Phaeothamnion, Phormidium, Phycopeltis, Phyllariochloris, Phyllocardium, Phyllomitas, Pinnularia, Pitophora, Placoneis, Planctonema, Planktosphaeria, Planothidium, Plectonema, Pleodorina, Pleurastrum, Pleurocapsa, Pleurocladia, Pleurodiscus, Pleurosigma, Pleurosira, Pleurotaenium, Pocillomonas, Podohedra, Polyblepharides, Polychaetophora, Polyedriella, Polyedriopsis, Polygoniochloris, Polyepidomonas, Polytaenia, Polytoma, Polytomella, Porphyridium, Posteriochromonas, Prasinochloris, Prasinocladus, Prasinophyta, Prasiola, Prochlorphyta, Prochlorothrix, Protoderma, Protosiphon, Provasoliella, Prymnesium, Psammodictyon, Psammothidium, Pseudanabaena, Pseudenoclonium, Psuedocarteria, Pseudochate, Pseudocharacium, Pseudococcomyxa, Pseudodictyosphaerium, Pseudokephyrion, Pseudoncobyrsa, Pseudoquadrigula, Pseudosphaerocystis, Pseudostaurastrum, Pseudostaurosira, Pseudotetrastrum, Pteromonas, Punctastruata, Pyramichlamys, Pyramimonas, Pyrrophyta, Quadrichloris, Quadricoccus, Quadrigula, Radiococcus, Radiofilum, Raphidiopsis, Raphidocelis, Raphidonema, Raphidophyta, Peimeria, Rhabdoderma, Rhabdomonas, Rhizoclonium, Rhodomonas, Rhodophyta, Rhoicosphenia, Rhopalodia, Rivularia, Rosenvingiella, Rossithidium, Roya, Scenedesmus, Scherffelia, Schizochlamydella, Schizochlamys, Schizomeris, Schizothrix, Schroederia, Scolioneis, Scotiella, Scotiellopsis, Scourfieldia, Scytonema, Selenastrum, Selenochloris, Sellaphora, Semiorbis, Siderocelis, Diderocystopsis, Dimonsenia, Siphononema, Sirocladium, Sirogonium, Skeletonema, Sorastrum, Spennatozopsis, Sphaerellocystis, Sphaerellopsis, Sphaerodinium, Sphaeroplea, Sphaerozosma, Spiniferomonas, Spirogyra, Spirotaenia, Spirulina, Spondylomorum, Spondylosium, Sporotetras, Spumella, Staurastrum, Stauerodesmus, Stauroneis, Staurosira, Staurosirella, Stenopterobia, Stephanocostis, Stephanodiscus, Stephanoporos, Stephanosphaera, Stichococcus, Stichogloea, Stigeoclonium, Stigonema, Stipitococcus, Stokesiella, Strombomonas, Stylochrysalis, Stylodinium, Styloyxis, Stylosphaeridium, Surirella, Sykidion, Symploca, Synechococcus, Synechocystis, Synedra, Synochromonas, Synura, Tabellaria, Tabularia, Teilingia, Temnogametum, Tetmemorus, Tetrachlorella, Tetracyclus, Tetradesmus, Tetraedriella, Tetraedron, Tetraselmis, Tetraspora, Tetrastrum, Thalassiosira, Thamniochaete, Thorakochloris, Thorea, Tolypella, Tolypothrix, Trachelomonas, Trachydiscus, Trebouxia, Trentepholia, Treubaria, Tribonema, Trichodesmium, Trichodiscus, Trochiscia, Tryblionella, Ulothrix, Uroglena, Uronema, Urosolenia, Urospora, Uva, Vacuolaria, Vaucheria, Volvox, Volvulina, Westella, Woloszynskia, Xanthidium, Xanthophyta, Xenococcus, Zygnema, Zygnemopsis, and Zygonium.

[0204] Additional cyanobacteria include members of the genus Chamaesiphon, Chroococcus, Cyanobacterium, Cyanobium, Cyanothece, Dactylococcopsis, Gloeobacter, Gloeocapsa, Gloeothece, Microcystis, Prochlorococcus, Prochloron, Synechococcus, Synechocystis, Cyanocystis, Dermocarpella, Stanieria, Xenococcus, Chroococcidiopsis, Myxosarcina, Arthrospira, Borzia, Crinalium, Geitlerinemia, Leptolyngbya, Limnothrix, Lyngbya, Microcoleus, Oscillatoria, Planktothrix, Prochiorothrix, Pseudanabaena, Spirulina, Starria, Symploca, Trichodesmium, Tychonema, Anabaena, Anabaenopsis, Aphanizomenon, Cyanospira, Cylindrospermopsis, Cylindrospermum, Nodularia, Nostoc, Scylonema, Calothrix, Rivularia, Tolypothrix, Chlorogloeopsis, Fischerella, Geitieria, Iyengariella, Nostochopsis, Stigonema and Thermosynechococcus.

[0205] Green non-sulfur bacteria include but are not limited to the following genera: Chloroflexus, Chloronema, Oscillochloris, Heliothrix, Herpetosiphon, Roseiflexus, and Thermomicrobium.

[0206] Green sulfur bacteria include but are not limited to the following genera: Chlorobium, Clathrochloris, and Prosthecochloris.

[0207] Purple sulfur bacteria include but are not limited to the following genera: Allochromatium, Chromatium, Halochromatium, Isochromatium, Marichromatium, Rhodovulum, Thermochromatium, Thiocapsa, Thiorhodococcus, and Thiocystis.

[0208] Purple non-sulfur bacteria include but are not limited to the following genera: Phaeospirillum, Rhodobaca, Rhodobacter, Rhodomicrobium, Rhodopila, Rhodopseudomonas, Rhodothalassium, Rhodospirillum, Rodovibrio, and Roseospira.

[0209] Aerobic chemolithotrophic bacteria include but are not limited to nitrifying bacteria such as Nitrobacteraceae sp., Nitrobacter sp., Nitrospina sp., Nitrococcus sp., Nitrospira sp., Nitrosomonas sp., Nitrosococcus sp., Nitrosospira sp., Nitrosolobus sp., Nitrosovibrio sp.; colorless sulfur bacteria such as, Thiovulum sp., Thiobacillus sp., Thiomicrospira sp., Thiosphaera sp., Thermothrix sp.; obligately chemolithotrophic hydrogen bacteria such as Hydrogenobacter sp., iron and manganese-oxidizing and/or depositing bacteria such as Siderococcus sp., and magnetotactic bacteria such as Aquaspirillum sp.

[0210] Archaeobacteria include but are not limited to methanogenic archaeobacteria such as Methanobacterium sp., Methanobrevibacter sp., Methanothermus sp., Methanococcus sp., Methanomicrobium sp., Methanospirillum sp., Methanogenium sp., Methanosarcina sp., Methanolobus sp., Methanothrix sp., Methanococcoides sp., Methanoplanus sp.; extremely thermophilic S-Metabolizers such as Thermoproteus sp., Pyrodictium sp., Sulfolobus sp., Acidianus sp. and other microorganisms such as, Bacillus subtilis, Saccharomyces cerevisiae, Streptomyces sp., Ralstonia sp., Rhodococcus sp., Corynebacteria sp., Brevibacteria sp., Mycobacteria sp., and oleaginous yeast.

[0211] Yet other suitable organisms include synthetic cells or cells produced by synthetic genomes as described in Venter et al. US Pat. Pub. No. 2007/0264688, and cell-like systems or synthetic cells as described in Glass et al. US Pat. Pub. No. 2007/0269862.

[0212] Still other suitable organisms include Escherichia coli, Acetobacter aceti, Bacillus subtilis, yeast and fungi such as Clostridium ljungdahlii, Clostridium thermocellum, Penicillium chrysogenum, Pichia pastoris, Saccharomyces cerevisiae, Schizosaccharomyces pombe, Pseudomonas fluorescens, or Zymomonas mobilis. In some embodiments those organisms are engineered to fix carbon dioxide while in other embodiments they are not.

[0213] In some embodiments eukaryotic cells, such as insect cells or mammalian cells, such as human cells are used as host cells. Vectors and expression control sequences including promoters and enhancers are well known for such cells. Examples of useful mammalian host cell lines for this purpose are monkey kidney CV1 line transformed by SV40 (COS-7, ATCC CRL 1651); human embryonic kidney line (293 or 293 cells subcloned for growth in suspension culture, Graham et al., J. Gen Virol. 36:59 (1977)); baby hamster kidney cells (BHK, ATCC CCL 10); Chinese hamster ovary cells/-DHFR (CHO, Urlaub et al., Proc. Natl. Acad. Sci. USA 77:4216 (1980)); mouse sertoli cells (TM4, Mather, Biol. Reprod. 23:243-251 (1980)); monkey kidney cells (CV1 ATCC CCL 70); African green monkey kidney cells (VERO-76, ATCC CRL-1587); human cervical carcinoma cells (HELA, ATCC CCL 2); canine kidney cells (MDCK, ATCC CCL 34); buffalo rat liver cells (BRL 3A, ATCC CRL 1442); human lung cells (W138, ATCC CCL 75); human liver cells (Hep G2, HB 8065); mouse mammary tumor (MMT 060562, ATCC CCL51); TRI cells (Mather et al., Annals N.Y. Acad. Sci. 383:44-68 (1982)); MRC 5 cells; FS4 cells; and a human hepatoma line (Hep G2).

### F. Production of Nutritive Proteins

[0214] Skilled artisans are aware of many suitable methods available for culturing recombinant cells to produce (and optionally secrete) a recombinant nutritive protein as disclosed herein, as well as for purification and/or isolation of expressed recombinant proteins. The methods chosen for protein purification depend on many variables, including the properties of the protein of interest, its location and form within the cell, the vector, host strain background, and the intended application for the expressed protein. Culture conditions can also have an effect on solubility and localization of a given target protein. Many approaches can be used to purify target proteins expressed in recombinant microbial cells as disclosed herein, including without limitation ion exchange and gel filtration.

[0215] In some embodiments a peptide fusion tag is added to the recombinant protein making possible a variety of affinity purification methods that take advantage of the peptide fusion tag. In some embodiments, the use of an affinity method enables the purification of the target protein to near homogeneity in one step. Purification may include cleavage of part or all of the fusion tag with enterokinase, factor Xa, thrombin, or HRV 3C proteases, for example. In some embodiments, before purification or activity measurements of an expressed target protein, preliminary analysis of expression levels, cellular localization, and solubility of the target protein is performed. The target protein may be found in any or all of the following fractions: soluble or insoluble cytoplasmic fractions, periplasm, or medium. Depending on the intended application, preferential localization to inclusion bodies, medium, or the periplasmic space can be advantageous, in some embodiments, for rapid purification by relatively simple procedures.

[0216] While Escherichia coli is widely regarded as a robust host for heterologous protein expression, it is also widely known that over-expression of many proteins in this host is prone to aggregation in the form of insoluble inclusion bodies. One of the most commonly used methods for either rescuing inclusion body formation, or to improve the titer of the protein itself, is to include an amino-terminal maltose-binding protein (MBP) [Austin B P, Nallamsetty S, Waugh D S. Hexahistidine-tagged maltose-binding protein as a fusion partner for the production of soluble recombinant proteins in Escherichia coli. Methods Mol Biol. 2009; 498:157-72], or small ubiquitin-related modifier (SUMO) [Saitoh H, Uwada J, Azusa K. Strategies for the expression of SUMO-modified target proteins in Escherichia coli. Methods Mol Biol. 2009; 497:211-21; Malakhov M P, Mattern M R, Malakhova O A, Drinker M, Weeks S D, Butt T R. SUMO fusions and SUMO-specific protease for efficient expression and purification of proteins. J Struct Funct Genomics. 2004; 5(1-2):75-86; Panavas T, Sanders C, Butt T R. SUMO fusion technology for enhanced protein production in prokaryotic and eukaryotic expression systems. Methods Mol Biol. 2009; 497:303-17] fusion to the protein of interest. These two proteins are expressed extremely well, and in the soluble form, in Escherichia coli such that the protein of interest is also effectively produced in the soluble form. The protein of interest can be cleaved by designing a site specific protease recognition sequence (such as the tobacco etch virus (TEV) protease) in-between the protein of interest and the fusion protein [1].

[0217] In some embodiments the recombinant protein is initially not folded correctly or is insoluble. A variety of methods are well known for refolding of insoluble proteins. Most protocols comprise the isolation of insoluble inclusion bodies by centrifugation followed by solubilization under denaturing conditions. The protein is then dialyzed or diluted into a non-denaturing buffer where refolding occurs. Because every protein possesses unique folding properties, the optimal refolding protocol for any given protein can be empirically determined by a skilled artisan. Optimal refolding conditions can, for example, be rapidly determined on a small scale by a matrix approach, in which variables such as protein concentration, reducing agent, redox treatment, divalent cations, etc., are tested. Once the optimal concentrations are found, they can be applied to a larger scale solubilization and refolding of the target protein.

[0218] In some embodiments the nutritive protein does not comprise a tertiary structure. In some embodiments less than half of the amino acids in the nutritive protein partipate in a tertiary structure. In some embodiments the nutritive protein does not comprise a secondary structure. In some embodiments less than half of the amino acids in the nutritive protein partipate in a secondary structure. Recombinant nutritive proteins may be isolated from a culture of cells expressing them in a state that comprises one or more of these structural features. In some embodiments the tertiary structure of a recombinant nutritive protein is reduced or eliminated after the protein is isolated from a culture producing it. In some embodiments the secondary structure of a recombinant nutritive protein is reduced or eliminated after the protein is isolated from a culture producing it.

[0219] In some embodiments a CAPS buffer at alkaline pH in combination with N-lauroylsarcosine is used to achieve solubility of the inclusion bodies, followed by dialysis in the presence of DTT to promote refolding. Depending on the target protein, expression conditions, and intended application, proteins solubilized from washed inclusion bodies may be >90% homogeneous and may not require further purification. Purification under fully denaturing conditions (before refolding) is possible using His.Tag® fusion proteins and His.Bind® immobilized metal affinity chromatography (Novogen®). In addition, S.Tag™, T7.Tag®, and Strep.Tag® II fusion proteins solubilized from inclusion bodies using 6 M urea can be purified under partially denaturing conditions by dilution to 2 M urea (S.Tag and T7.Tag) or 1 M urea (Strep.Tag II) prior to chromatography on the appropriate resin. Refolded fusion proteins can be affinity purified under native conditions using His.Tag, S.Tag, Strep.Tag II, and other appropriate affinity tags (e.g., GST.Tag™, and T7.Tag) (Novogen®).

[0220] In some embodiments the recombinat nutritive protein is an endogenous protein of the host cell used to express it. That is, the cellular genome of the host cell comprises an open reading frame that encodes the recombinant nutritive protein. In some embodiments regulatory sequences sufficient to increase expression of the nutritive protein are inserted into the host cell genome and operatively linked to the endogenous open reading frame such that the regulatory sequences drive overexpression of the recombinant nutritive protein from a recombinant nucleic acid. In some embodiments heterologous nucleic acid sequences are fused to the endogenous open reading frame of the nutritive protein and cause the nutritive protein to be synthesized comprising a hetgerologous amino acid sequence that changes the cellular trafficking of the recombinant nutritive protein, such as directing it to an organelle or to a secretion pathway. In some embodiments an open reading frame that encodes the endogeneous host cell protein is introduced into the host cell on a plasmid that further comprises regulatory sequences operatively linked to the open reading frame. In some embodiments the recombinant host cell expresses at least 2 times, at least 3 times, at least 4 times, at least 5 times, at least 10 times, or at least 20 times, at least 30 times, at least 40 times, at least 50 times, or at least 100 times more of the recombinant nutritive protein than the amount of the nutritive protein produced by a similar host cell grown under similar conditions.

[0221] In some embodiments nutritive proteins of this disclosure are synthsized chemically without the use of a recombinant production system. Protein synthesis can be carried out in a liquid-phase system or in a solid-phase system using techniques knowen in the art (see, e.g., Atherton, E., Sheppard, R. C. (1989). Solid Phase peptide synthesis: a practical approach. Oxford, England: IRL Press; Stewart, J. M., Young, J. D. (1984). Solid phase peptide synthesis (2nd ed.). Rockford: Pierce Chemical Company).

### G. Production of Recombinant Nutritive Proteins in Plants

[0222] The nucleic acid molecules comprising a nucleic acid sequence encoding a nutritive protein of this disclosure enable production of transgenic plants comprising the nucleic acid sequence. Accordingly, this disclosure also provides plant comprising a recombinant nucleic acid molecule comprising a nucleic acid sequence encoding a nutritive protein of this disclosure. The plant can be any plant that is subject to transformation and regeneration and include, but are not limited to, Acacia, alfalfa, aneth, apple, apricot, artichoke, arugula, asparagus, avocado, banana, barley, beans, beet, blackberry, blueberry, broccoli, brussels sprouts, cabbage, canola, cantaloupe, carrot, cassaya, cauliflower, celery, Chinese cabbage, cherry, cilantro, citrus, clementines, coffee, corn, cotton, cucumber, Douglas fir, eggplant, endive, escarole, eucalyptus, fennel, figs, forest trees, gourd, grape, grapefruit, honey dew, jicama, kiwifruit, lettuce, leeks, lemon, lime, Loblolly pine, mango, melon, mushroom, nut, oat, okra, onion, orange, an ornamental plant, papaya, parsley, pea, peach, peanut, pear, pepper, persimmon, pine, pineapple, plantain, plum, pomegranate, poplar, potato, pumpkin, quince, radiata pine, radicchio, radish, rapeseed, raspberry, rice, rye, sorghum, Southern pine, soybean, spinach, squash, strawberry, sugarbeet, sugarcane, sunflower, sweet corn, sweet potato, sweetgum, tangerine, tea, tobacco, tomato, turf, a vine, watermelon, wheat, yams, and zucchini. In preferred embodiments, the plant is a bean, broccoli, cabbage, canola, carrot, cauliflower, celery, Chinese cabbage, corn, cotton cucumber, eggplant, leek, lettuce, melon, pea, pepper, pumpkin, radish, spinach, soybean, squash, sugarcane, sweet corn, tomato, watermelon, and wheat plant. In some embodiments, the plant is a corn plant. In some embodiments, the plant is a soybean plant. In some embodiments, the plant is a cotton plant. In some embodiments, the plant is a canola plant. In some embodiments the plant is a member of a genus selected from Arabidopsis, Beta, Glycine, Jatropha, Miscanthus, Panicum, Phalaris, Populus, Saccharum, Salix, Simmondsia and Zea.

[0223] Numerous promoters that are active in plant cells have been described in the literature. These include promoters present in plant genomes as well as promoters from other sources, including nopaline synthase (NOS) promoter and octopine synthase (OCS) promoters carried on tumor-inducing plasmids of Agrobacterium tumefaciens, caulimovirus promoters such as the cauliflower mosaic virus. For instance, see U.S. Pat. Nos. 5,858,742 and 5,322,938, which disclose versions of the constitutive promoter derived from cauliflower mosaic virus (CaMV35S), U.S. Pat. No. 5,641,876, which discloses a rice actin promoter, U.S. Patent Application Publication 2002/0192813A1, which discloses 5′, 3′ and intron elements useful in the design of effective plant expression vectors, U.S. patent application Ser. No. 09/757,089, which discloses a maize chloroplast aldolase promoter, U.S. patent application Ser. No. 08/706,946, which discloses a rice glutelin promoter, U.S. patent application Ser. No. 09/757,089, which discloses a maize aldolase (FDA) promoter, and U.S. patent application Ser. No. 60/310,370, which discloses a maize nicotianamine synthase promoter. These and numerous other promoters that function in plant cells are known to those skilled in the art and available for use in recombinant nucleic acids to provide for expression of nutritive proteins in transgenic plants.

[0224] For some applications preferential expression in plant green tissues is desired. Promoters of interest for such uses include those from genes such as Arabidopsis thaliana ribulose-1,5-bisphosphate carboxylase (Rubisco) small subunit (Fischhoff et al. (1992) Plant Mol. Biol. 20:81-93), aldolase and pyruvate orthophosphate dikinase (PPDK) (Taniguchi et al. (2000) Plant Cell Physiol. 41(1):42-48).

[0225] Furthermore, the promoters may be altered to contain at least one enhancer sequence to assist in elevating gene expression. Such enhancers are known in the art. By including an enhancer sequence with such constructs, the expression of the nutritive protein may be enhanced. These enhancers often are found 5′ to the start of transcription in a promoter that functions in eukaryotic cells, but can often be inserted upstream (5′) or downstream (3′) to the coding sequence. In some instances, these 5′ enhancing elements are introns. Particularly useful as enhancers are the 5′ introns of the rice actin 1 (see U.S. Pat. No. 5,641,876) and rice actin 2 genes, the maize alcohol dehydrogenase gene intron, the maize heat shock protein 70 gene intron (U.S. Pat. No. 5,593,874) and the maize shrunken 1 gene.

[0226] For some applications expression in plant seed tissues is desired to effect modify seed composition. Exemplary promoters for use for seed composition modification include promoters from seed genes such as napin (U.S. Pat. No. 5,420,034), maize L3 oleosin (U.S. Pat. No. 6,433,252), zein Z27 (Russell et al. (1997) Transgenic Res. 6(2):157-166), globulin 1 (Belanger et al (1991) Genetics 129:863-872), glutelin 1 (Russell (1997) supra), and peroxiredoxin antioxidant (Per1) (Stacy et al. (1996) Plant Mol. Biol. 31(6):1205-1216)

[0227] Recombinant nucleic acid constructs prepared in accordance with the disclsoure will also generally include a 3′ element that typically contains a polyadenylation signal and site. Well-known 3′ elements include those from Agrobacterium tumefaciens genes such as nos 3′, tml 3′, tmr 3′, tms 3′, ocs 3′, tr7 3′, for example disclosed in U.S. Pat. No. 6,090,627; 3′ elements from plant genes such as wheat (Triticum aesevitum) heat shock protein 17 (Hsp17 3′), a wheat ubiquitin gene, a wheat fructose-1,6-biphosphatase gene, a rice glutelin gene a rice lactate dehydrogenase gene and a rice beta-tubulin gene, all of which are disclosed in U.S. published patent application 2002/0192813 A1; and the pea (Pisum sativum) ribulose biphosphate carboxylase gene (rbs 3′), and 3′ elements from the genes within the host plant.

[0228] Constructs and vectors may also include a transit peptide for targeting of a gene target to a plant organelle, particularly to a chloroplast, leucoplast or other plastid organelle. For descriptions of the use of chloroplast transit peptides see U.S. Pat. No. 5,188,642 and U.S. Pat. No. 5,728,925. For description of the transit peptide region of an Arabidopsis EPSPS gene, see Klee, H. J. et al (MGG (1987) 210:437-442).

[0229] Numerous methods for transforming plant cells with recombinant DNA are known in the art and may be used in the present disclosure. Two commonly used methods for plant transformation are Agrobacterium-mediated transformation and microprojectile bombardment. Microprojectile bombardment methods are illustrated in U.S. Pat. No. 5,015,580 (soybean); U.S. Pat. No. 5,550,318 (corn); U.S. Pat. No. 5,538,880 (corn); U.S. Pat. No. 5,914,451 (soybean); U.S. Pat. No. 6,160,208 (corn); U.S. Pat. No. 6,399,861 (corn) and U.S. Pat. No. 6,153,812 (wheat) and Agrobacterium-mediated transformation is described in U.S. Pat. No. 5,159,135 (cotton); U.S. Pat. No. 5,824,877 (soybean); U.S. Pat. No. 5,591,616 (corn); and U.S. Pat. No. 6,384,301 (soybean). For Agrobacterium tumefaciens based plant transformation system, additional elements present on transformation constructs will include T-DNA left and right border sequences to facilitate incorporation of the recombinant polynucleotide into the plant genome.

[0230] In general it is useful to introduce recombinant DNA randomly, i.e. at a non-specific location, in the genome of a target plant line. In special cases it may be useful to target recombinant DNA insertion in order to achieve site-specific integration, for example to replace an existing gene in the genome, to use an existing promoter in the plant genome, or to insert a recombinant polynucleotide at a predetermined site known to be active for gene expression. Several site specific recombination systems exist which are known to function in plants, including cre-lox as disclosed in U.S. Pat. No. 4,959,317 and FLP-FRT as disclosed in U.S. Pat. No. 5,527,695.

[0231] Transformation methods are generally practiced in tissue culture on media and in a controlled environment. “Media” refers to the numerous nutrient mixtures that are used to grow cells in vitro, that is, outside of the intact living organism. Recipient cell targets include, but are not limited to, meristem cells, callus, immature embryos and gametic cells such as microspores, pollen, sperm and egg cells. It is contemplated that any cell from which a fertile plant may be regenerated is useful as a recipient cell. Callus may be initiated from tissue sources including, but not limited to, immature embryos, seedling apical meristems, microspores and the like. Cells capable of proliferating as callus are also recipient cells for genetic transformation. Practical transformation methods and materials for making transgenic plants of this disclosure, for example various media and recipient target cells, transformation of immature embryo cells and subsequent regeneration of fertile transgenic plants are disclosed in U.S. Pat. Nos. 6,194,636 and 6,232,526.

[0232] The seeds of transgenic plants can be harvested from fertile transgenic plants and used to grow progeny generations of transformed plants that produce the recombinant nutritive protein of this disclosure. In addition to direct transformation of a plant with a recombinant DNA, transgenic plants can be prepared by crossing a first plant having a recombinant DNA with a second plant lacking the DNA. For example, recombinant DNA can be introduced into first plant line that is amenable to transformation to produce a transgenic plant which can be crossed with a second plant line to introgress the recombinant DNA into the second plant line. A transgenic plant with recombinant DNA encoding a nutritive protein of this disclosure, can be crossed with transgenic plant line having other recombinant DNA that confers another trait, for example herbicide resistance or pest resistance, or production of a second nutritive product such as an oil, to produce progeny plants having recombinant DNA that confers both traits. Typically, in such breeding for combining traits the transgenic plant donating the additional trait is a male line and the transgenic plant carrying the base traits is the female line. The progeny of this cross will segregate such that some of the plants will carry the DNA for both parental traits and some will carry DNA for one parental trait; such plants can be identified by markers associated with parental recombinant DNA, e.g. marker identification by analysis for recombinant DNA or, in the case where a selectable marker is linked to the recombinant, by application of the selecting agent such as a herbicide for use with a herbicide tolerance marker, or by selection for the enhanced trait. Progeny plants carrying DNA for both parental traits can be crossed back into the female parent line multiple times, for example usually 6 to 8 generations, to produce a progeny plant with substantially the same genotype as one original transgenic parental line but for the recombinant DNA of the other transgenic parental line.

[0233] In the practice of transformation DNA is typically introduced into only a small percentage of target plant cells in any one transformation experiment. Marker genes are used to provide an efficient system for identification of those cells that are stably transformed by receiving and integrating a transgenic DNA construct into their genomes. Preferred marker genes provide selective markers which confer resistance to a selective agent, such as an antibiotic or herbicide. Any of the herbicides to which the transformed plants may be resistant are useful agents for selective markers. Potentially transformed cells are exposed to the selective agent. In the population of surviving cells will be those cells where, generally, the resistance-conferring gene is integrated and expressed at sufficient levels to permit cell survival. Cells may be tested further to confirm stable integration of the exogenous DNA. Commonly used selective marker genes include those conferring resistance to antibiotics such as kanamycin and paromomycin (nptll), hygromycin B (aph IV) and gentamycin (aac3 and aacC4) or resistance to herbicides such as glufosinate (bar or pat) and glyphosate (aroA or EPSPS). Examples of such selectable are illustrated in U.S. Pat. Nos. 5,550,318; 5,633,435; 5,780,708 and 6,118,047. Selectable markers which provide an ability to visually identify transformants can also be employed, for example, a gene expressing a colored or fluorescent protein such as a luciferase or green fluorescent protein (GFP) or a gene expressing a beta-glucuronidase or uidA gene (GUS) for which various chromogenic substrates are known.

[0234] Plant cells that survive exposure to the selective agent, or plant cells that have been scored positive in a screening assay, may be cultured in regeneration media and allowed to mature into plants. Developing plantlets regenerated from transformed plant cells can be transferred to plant growth mix, and hardened off, for example, in an environmentally controlled chamber. Plants are regenerated from about 6 weeks to 10 months after a transformant is identified, depending on the initial tissue. Plants may be pollinated using conventional plant breeding methods known to those of skill in the art and seed produced, for example self-pollination is commonly used with transgenic corn. The regenerated transformed plant or its progeny seed or plants can be tested for expression of the recombinant DNA and selected for the presence of a heterologous nutritive protein.

[0235] Transgenic plants derived from the plant cells of this disclosure are grown to generate transgenic plants comprising the heterologous nucleic acid that encodes a nutritive protein of this disclosure and produce transgenic seed and haploid pollen comprising the heterologous nucleic acid sequence. Such plants with enhanced traits are identified by selection of transformed plants or progeny seed for the enhanced trait. Transgenic plants grown from transgenic seed provided herein demonstrate improved agronomic traits that contribute to increased yield or other traits that provide increased plant value, including, for example, improved protein quality such as increasing the content of at least one of essential amino acids, branch chain amino acids, or Leu.

[0236] The transgenic plants are useful as sources of nutritive proteins. For example, in some embodiments a transgenic plant comprising a recombinant nutritive protein of this disclosure comprises an increased weight fraction of total protein compared to a control non-transgenic plant. In some embodiments a transgenic plant comprising a recombinant nutritive protein of this disclosure comprises an increased weight fraction of essential amino acids compared to a control non-transgenic plant. In some embodiments a transgenic plant comprising a recombinant nutritive protein of this disclosure comprises an increased weight fraction of branch chain amino acids compared to a control non-transgenic plant. In some embodiments a transgenic plant comprising a recombinant nutritive protein of this disclosure comprises an increased weight fraction of Leu compared to a control non-transgenic plant. I′n some embodiments a transgenic plant comprising a recombinant nutritive protein of this disclosure comprises at least one of: a) an increased ratio of branch chain amino acid residues to total amino acid residues compared to a control non-transgenic plant; b) an increased ratio of Leu residues to total amino acid residues compared to a control non-transgenic plant; and c) an increased ratio of essential amino acid residues to total amino acid residues compared to a control non-transgenic plant. In some embodiments a transgenic plant comprising a recombinant nutritive protein of this disclosure comprises: a) an increased ratio of branch chain amino acid residues to total amino acid residues compared to a control non-transgenic plant; b) an increased ratio of Leu residues to total amino acid residues compared to a control non-transgenic plant; and c) an increased ratio of essential amino acid residues to total amino acid residues compared to a control non-transgenic plant.

[0237] Accordingly, the transgenic plants are useful as sources of high quality protein. The plants may be harvested and used in mammalian diets with or without further processing. For example, flour made from transgenic wheat, cornmeal made from transgenic corn, or rice or rice flour derived from transgenic rice is enriched in at least one of protein, essential amino acids, branch chain amino acids, and Leu compared to similar products made from plants that do not comprise the recombinant nutritive protein. In some embodiments the recombinant nutritive protein is a plant protein or comprises a polypeptide sequence of a plant protein or a derivative or mutein thereof, such as but not necessarily a protein or polpeptide sequence of the same type of plant. In other embodiments the recombinant nutritive protein is not a plant protein or a derivative or mutein thereof.

[0238] In some embodiments the recombinant nutritive protein is recovered or partially recovered from the transgenic plant before it is consumed by a mammal.

### H. Compositions

[0239] At least one nutritive protein disclosed herein may be combined with at least one second component to form a nutritive composition. In some embodiments the only source of amino acid in the composition is the at least one nutritive protein disclosed herein. In such embodiments the amino acid composition of the composition will be the same as the amino acid composition of the at least one nutritive protein disclosed herein. In some embodiments the composition comprises at least one nutritive protein disclosed herein and at least one second protein. In some embodiments the at least one second protein is a second nutritive protein disclosed herein, while in other embodiments the at least one second protein is not a nutritive protein disclosed herein. In some embodiments the composition comprises 1, 2, 3, 4, 5, 6, 7, 8, 9, 10, 11, 12, 13, 14, 15, 16, 17, 18, 19, 20 or more nutritive proteins disclosed herein. In some embodiments the composition comprises 0, 1, 2, 3, 4, 5, 6, 7, 8, 9, 10, 11, 12, 13, 14, 15, 16, 17, 18, 19, 20 or more proteins that are not nutritive proteins disclosed herein. In some embodiments the composition comprises 1, 2, 3, 4, 5, 6, 7, 8, 9, 10, 11, 12, 13, 14, 15, 16, 17, 18, 19, 20 or more nutritive proteins and the composition comprises 0, 1, 2, 3, 4, 5, 6, 7, 8, 9, 10, 11, 12, 13, 14, 15, 16, 17, 18, 19, 20 or more proteins that are not nutritive proteins disclosed herein.

[0240] In some embodiments the nutritive composition as described in the preceding paragraph, further comprises at least one of at least one polypeptide, at least one peptide, and at least one free amino acid. In some embodiments the nutritive composition comprises at least one polypeptide and at least one peptide. In some embodiments the nutritive composition comprises at least one polypeptide and at least one free amino acid. In some embodiments the nutritive composition comprises at least one peptide and at least one free amino acid. In some embodiments the at least one polypeptide, at least one peptide, and/or at least one free amino acid comprises amino acids selected from 1) branch chain amino acids, 2) leucine, and 3) essential amino acids. In some embodiments the at least one polypeptide, at least one peptide, and/or at least one free amino acid consists of amino acids selected from 1) branch chain amino acids, 2) leucine, and 3) essential amino acids. In some embodiments, the nutritive composition comprises at least one modified amino acid or a non-standard amino acid. Modified amino acids include amino acids that have modifications to one or more of the carboxy terminus, amino terminus, and/or side chain. Non-standard amino acids may be selected from those that are formed by post-translational modification of proteins, for example, carboxylated glutamate, hydroxyproline, or hypusine. Other non-standard amino acids are not found in proteins. Examples include lanthionine, 2-aminoisobutyric acid, dehydroalanine, gamma-aminobutyric acid, ornithine and citrulline. In some embodiments, the nutritive composition comprises one or more D-amino acids. In some embodiments, the nutritive composition comprises one or more L-amino acids. In some embodiments, the nutritive composition comprises a mixture of one or more D-amino acids and one or more L-amino acids.

[0241] By adding at least one of a polypeptide, a peptide, and a free amino acid to a nutritive composition the proportion of at least one of branch chain amino acids, leucine, and essential amino acids, to total amino acid, present in the composition can be increased.

[0242] In some embodiments the composition comprises at least one carbohydrate. A “carbohydrate” refers to a sugar or polymer of sugars. The terms “saccharide,” “polysaccharide,” “carbohydrate,” and “oligosaccharide” may be used interchangeably. Most carbohydrates are aldehydes or ketones with many hydroxyl groups, usually one on each carbon atom of the molecule. Carbohydrates generally have the molecular formula CₙH₂ₙOₙ. A carbohydrate may be a monosaccharide, a disaccharide, trisaccharide, oligosaccharide, or polysaccharide. The most basic carbohydrate is a monosaccharide, such as glucose, sucrose, galactose, mannose, ribose, arabinose, xylose, and fructose. Disaccharides are two joined monosaccharides. Exemplary disaccharides include sucrose, maltose, cellobiose, and lactose. Typically, an oligosaccharide includes between three and six monosaccharide units (e.g., raffinose, stachyose), and polysaccharides include six or more monosaccharide units. Exemplary polysaccharides include starch, glycogen, and cellulose. Carbohydrates may contain modified saccharide units such as 2′-deoxyribose wherein a hydroxyl group is removed, 2′-fluororibose wherein a hydroxyl group is replace with a fluorine, or N-acetylglucosamine, a nitrogen-containing form of glucose (e.g., 2′-fluororibose, deoxyribose, and hexose). Carbohydrates may exist in many different forms, for example, conformers, cyclic forms, acyclic forms, stereoisomers, tautomers, anomers, and isomers.

[0243] In some embodiments the composition comprises at least one lipid. As used herein a “lipid” includes fats, oils, triglycerides, cholesterol, phospholipids, fatty acids in any form including free fatty acids. Fats, oils and fatty acids may be saturated, unsaturated (cis or trans) or partially unsaturated (cis or trans). In some embodiments the lipid comprises at least one fatty acid selected from lauric acid (12:0), myristic acid (14:0), palmitic acid (16:0), palmitoleic acid (16:1), margaric acid (17:0), heptadecenoic acid (17:1), stearic acid (18:0), oleic acid (18:1), linoleic acid (18:2), linolenic acid (18:3), octadecatetraenoic acid (18:4), arachidic acid (20:0), eicosenoic acid (20:1), eicosadienoic acid (20:2), eicosatetraenoic acid (20:4), eicosapentaenoic acid (20:5) (EPA), docosanoic acid (22:0), docosenoic acid (22:1), docosapentaenoic acid (22:5), docosahexaenoic acid (22:6) (DHA), and tetracosanoic acid (24:0). In some embodiments the composition comprises at least one modified lipid, for example a lipid that has been modified by cooking.

[0244] In some embodiments the composition comprises at least one supplemental mineral or mineral source. Examples of minerals include, without limitation: chloride, sodium, calcium, iron, chromium, copper, iodine, zinc, magnesium, manganese, molybdenum, phosphorus, potassium, and selenium. Suitable forms of any of the foregoing minerals include soluble mineral salts, slightly soluble mineral salts, insoluble mineral salts, chelated minerals, mineral complexes, non-reactive minerals such as carbonyl minerals, and reduced minerals, and combinations thereof.

[0245] In some embodiments the composition comprises at least one supplemental vitamin. The at least one vitamin can be fat-soluble or water soluble vitamins. Suitable vitamins include but are not limited to vitamin C, vitamin A, vitamin E, vitamin B 12, vitamin K, riboflavin, niacin, vitamin D, vitamin B6, folic acid, pyridoxine, thiamine, pantothenic acid, and biotin. Suitable forms of any of the foregoing are salts of the vitamin, derivatives of the vitamin, compounds having the same or similar activity of the vitamin, and metabolites of the vitamin.

[0246] In some embodiments the composition comprises at least one organism. Suitable examples are well known in the art and include probiotics (e.g., species of Lactobacillus or Bifidobacterium), spirulina, chlorella, and porphyra.

[0247] In some embodiments the composition comprises at least one dietary supplement. Suitable examples are well known in the art and include herbs, botanicals, and certain hormones. Non limiting examples include ginko, gensing, and melatonin.

[0248] In some embodiments the composition comprises an excipient. Non-limiting examples of suitable excipients include a buffering agent, a preservative, a stabilizer, a binder, a compaction agent, a lubricant, a dispersion enhancer, a disintegration agent, a flavoring agent, a sweetener, a coloring agent.

[0249] In some embodiments the excipient is a buffering agent. Non-limiting examples of suitable buffering agents include sodium citrate, magnesium carbonate, magnesium bicarbonate, calcium carbonate, and calcium bicarbonate.

[0250] In some embodiments the excipient comprises a preservative. Non-limiting examples of suitable preservatives include antioxidants, such as alpha-tocopherol and ascorbate, and antimicrobials, such as parabens, chlorobutanol, and phenol.

[0251] In some embodiments the composition comprises a binder as an excipient. Non-limiting examples of suitable binders include starches, pregelatinized starches, gelatin, polyvinylpyrolidone, cellulose, methylcellulose, sodium carboxymethylcellulose, ethylcellulose, polyacrylamides, polyvinyloxoazolidone, polyvinylalcohols, C₁₂-C₁₈ fatty acid alcohol, polyethylene glycol, polyols, saccharides, oligosaccharides, and combinations thereof.

[0252] In some embodiments the composition comprises a lubricant as an excipient.

[0253] Non-limiting examples of suitable lubricants include magnesium stearate, calcium stearate, zinc stearate, hydrogenated vegetable oils, sterotex, polyoxyethylene monostearate, talc, polyethyleneglycol, sodium benzoate, sodium lauryl sulfate, magnesium lauryl sulfate, and light mineral oil.

[0254] In some embodiments the composition comprises a dispersion enhancer as an excipient. Non-limiting examples of suitable dispersants include starch, alginic acid, polyvinylpyrrolidones, guar gum, kaolin, bentonite, purified wood cellulose, sodium starch glycolate, isoamorphous silicate, and microcrystalline cellulose as high HLB emulsifier surfactants.

[0255] In some embodiments the composition comprises a disintegrant as an excipient. In some embodiments the disintegrant is a non-effervescent disintegrant. Non-limiting examples of suitable non-effervescent disintegrants include starches such as corn starch, potato starch, pregelatinized and modified starches thereof, sweeteners, clays, such as bentonite, micro-crystalline cellulose, alginates, sodium starch glycolate, gums such as agar, guar, locust bean, karaya, pecitin, and tragacanth. In some embodiments the disintegrant is an effervescent disintegrant. Non-limiting examples of suitable effervescent disintegrants include sodium bicarbonate in combination with citric acid, and sodium bicarbonate in combination with tartaric acid.

[0256] In some embodiments the excipient comprises a flavoring agent. Flavoring agents incorporated into the outer layer can be chosen from synthetic flavor oils and flavoring aromatics; natural oils; extracts from plants, leaves, flowers, and fruits; and combinations thereof. In some embodiments the flavoring agent is selected from cinnamon oils; oil of wintergreen; peppermint oils; clover oil; hay oil; anise oil; eucalyptus; vanilla; citrus oil such as lemon oil, orange oil, grape and grapefruit oil; and fruit essences including apple, peach, pear, strawberry, raspberry, cherry, plum, pineapple, and apricot.

[0257] In some embodiments the excipient comprises a sweetener. Non-limiting examples of suitable sweeteners include glucose (corn syrup), dextrose, invert sugar, fructose, and mixtures thereof (when not used as a carrier); saccharin and its various salts such as the sodium salt; dipeptide sweeteners such as aspartame; dihydrochalcone compounds, glycyrrhizin; Stevia Rebaudiana (Stevioside); chloro derivatives of sucrose such as sucralose; and sugar alcohols such as sorbitol, mannitol, sylitol, and the like. Also contemplated are hydrogenated starch hydrolysates and the synthetic sweetener 3,6-dihydro-6-methyl-1,2,3-oxathiazin-4-one-2,2-dioxide, particularly the potassium salt (acesulfame-K), and sodium and calcium salts thereof.

[0258] In some embodiments the composition comprises a coloring agent. Non-limiting examples of suitable color agents include food, drug and cosmetic colors (FD&C), drug and cosmetic colors (D&C), and external drug and cosmetic colors (Ext. D&C). The coloring agents can be used as dyes or their corresponding lakes.

[0259] The weight fraction of the excipient or combination of excipients in the formulation is usually about 50% or less, about 45% or less, about 40% or less, about 35% or less, about 30% or less, about 25% or less, about 20% or less, about 15% or less, about 10% or less, about 5% or less, about 2% or less, or about 1% or less of the total weight of the amino acids in the composition.

[0260] The nutritive proteins and nutritive compositions disclosed herein can be formulated into a variety of forms and administered by a number of different means. The compositions can be administered orally, rectally, or parenterally, in formulations containing conventionally acceptable carriers, adjuvants, and vehicles as desired. The term “parenteral” as used herein includes subcutaneous, intravenous, intramuscular, or intrasternal injection and infusion techniques. In an exemplary embodiment, the nutritive protein or composition is administered orally.

[0261] Solid dosage forms for oral administration include capsules, tablets, caplets, pills, troches, lozenges, powders, and granules. A capsule typically comprises a core material comprising a nutritive protein or composition and a shell wall that encapsulates the core material. In some embodiments the core material comprises at least one of a solid, a liquid, and an emulsion. In some embodiments the shell wall material comprises at least one of a soft gelatin, a hard gelatin, and a polymer. Suitable polymers include, but are not limited to: cellulosic polymers such as hydroxypropyl cellulose, hydroxyethyl cellulose, hydroxypropyl methyl cellulose (HPMC), methyl cellulose, ethyl cellulose, cellulose acetate, cellulose acetate phthalate, cellulose acetate trimellitate, hydroxypropylmethyl cellulose phthalate, hydroxypropylmethyl cellulose succinate and carboxymethylcellulose sodium; acrylic acid polymers and copolymers, such as those formed from acrylic acid, methacrylic acid, methyl acrylate, ammonio methylacrylate, ethyl acrylate, methyl methacrylate and/or ethyl methacrylate (e.g., those copolymers sold under the trade name “Eudragit”); vinyl polymers and copolymers such as polyvinyl pyrrolidone, polyvinyl acetate, polyvinylacetate phthalate, vinylacetate crotonic acid copolymer, and ethylene-vinyl acetate copolymers; and shellac (purified lac). In some embodiments at least one polymer functions as taste-masking agents.

[0262] Tablets, pills, and the like can be compressed, multiply compressed, multiply layered, and/or coated. The coating can be single or multiple. In one embodiment, the coating material comprises at least one of a saccharide, a polysaccharide, and glycoproteins extracted from at least one of a plant, a fungus, and a microbe. Non-limiting examples include corn starch, wheat starch, potato starch, tapioca starch, cellulose, hemicellulose, dextrans, maltodextrin, cyclodextrins, inulins, pectin, mannans, gum arabic, locust bean gum, mesquite gum, guar gum, gum karaya, gum ghatti, tragacanth gum, funori, carrageenans, agar, alginates, chitosans, or gellan gum. In some embodiments the coating material comprises a protein. In some embodiments the coating material comprises at least one of a fat and an oil. In some embodiments the at least one of a fat and an oil is high temperature melting. In some embodiments the at least one of a fat and an oil is hydrogenated or partially hydrogenated. In some embodiments the at least one of a fat and an oil is derived from a plant. In some embodiments the at least one of a fat and an oil comprises at least one of glycerides, free fatty acids, and fatty acid esters. In some embodiments the coating material comprises at least one edible wax. The edible wax can be derived from animals, insects, or plants. Non-limiting examples include beeswax, lanolin, bayberry wax, carnauba wax, and rice bran wax. Tablets and pills can additionally be prepared with enteric coatings.

[0263] Alternatively, powders or granules embodying the nutritive proteins and nutritive compositions disclosed herein can be incorporated into a food product. In some embodiments the food product is be a drink for oral administration. Non-limiting examples of a suitable drink include fruit juice, a fruit drink, an artificially flavored drink, an artificially sweetened drink, a carbonated beverage, a sports drink, a liquid diary product, a shake, an alcoholic beverage, a caffeinated beverage, infant formula and so forth. Other suitable means for oral administration include aqueous and nonaqueous solutions, creams, pastes, emulsions, suspensions and slurries, each of which may optionally also containin at least one of suitable solvents, preservatives, emulsifying agents, suspending agents, diluents, sweeteners, coloring agents, and flavoring agents.

[0264] In some embodiments the food product is a solid foodstuff. Suitable examples of a solid foodstuff include without limitation a food bar, a snack bar, a cookie, a brownie, a muffin, a cracker, a biscuit, a cream or paste, an ice cream bar, a frozen yogurt bar, and the like.

[0265] In some embodiments, the nutritive proteins and nutritive compositions disclosed herein are incorporated into a therapeutic food. In some embodiments, the therapeutic food is a ready-to-use food that optionally contains some or all essential macronutrients and micronutrients. In some embodiments, the nutritive proteins and nutritive compositions disclosed herein are incorporated into a supplementary food that is designed to be blended into an existing meal. In some embodiments, the supplemental food contains some or all essential macronutrients and micronutrients. In some embodiments, the nutritive proteins and nutritive compositions disclosed herein are blended with or added to an existing food to fortify the food's protein nutrition. Examples include food staples (grain, salt, sugar, cooking oil, margarine), beverages (coffee, tea, soda, beer, liquor, sports drinks), snacks, sweets and other foods.

[0266] The compositions disclosed herein can be utilized in methods to increase at least one of muscle mass, strength and physical function, thermogenesis, metabolic expenditure, satiety, mitochondrial biogenesis, weight or fat loss, and lean body composition for example.

### I. Methods of Use

[0267] In some embodiments the nutritive proteins and nutritive compositions disclosed herein are administered to a patient or a user (sometimes collectively refered to as a “subject”). As used herein “administer” and “administration” encompasses embodiments in which one person directs another to consume a nutritive protein or nutritive composition in a certain manner and/or for a certain purpose, and also situations in which a user uses a nutritive protein or nutritive composition in a certain manner and/or for a certain purpose independently of or in variance to any instructions received from a second person. Non-limiting examples of embodiments in which one person directs another to consume a nutritive protein or nutritive composition in a certain manner and/or for a certain purpose include when a physician prescribes a course of conduct and/or treatment to a patient, when a trainer advises a user (such as an athlete) to follow a particular course of conduct and/or treatment, and when a manufacturer, distributer, or marketer recommends conditions of use to an end user, for example through advertisements or labeling on packaging or on other materials provided in association with the sale or marketing of a product.

[0268] In some embodiments the nutritive proteins or nutritive compositions are provided in a dosage form. In some embodiments the dosage form is designed for administration of at least one nutritive protein disclosed herein, wherein the total amount of nutritive protein administered is selected from 0.1 g to 1 g, 1 g to 5 g, from 2 g to 10 g, from 5 g to 15 g, from 10 g to 20 g, from 15 g to 25 g, from 20 g to 40 g, from 25-50 g, and from 30-60 g. In some embodiments the dosage form is designed for administration of at least one nutritive protein disclosed herein, wherein the total amount of nutritive protein administered is selected from about 0.1 g, 0.1 g-1 g, 1 g, 2 g, 3 g, 4 g, 5 g, 6 g, 7 g, 8 g, 9 g, 10 g, 15 g, 20 g, 25 g, 30 g, 35 g, 40 g, 45 g, 50 g, 55 g, 60 g, 65 g, 70 g, 75 g, 80 g, 85 g, 90 g, 95 g, and 100 g.

[0269] In some embodiments the dosage form is designed for administration of at least one nutritive protein disclosed herein, wherein the total amount of essential amino acids administered is selected from 0.1 g to 1 g, from 1 g to 5 g, from 2 g to 10 g, from 5 g to 15 g, from 10 g to 20 g, and from 1-30 g. In some embodiments the dosage form is designed for administration of at least one nutritive protein disclosed herein, wherein the total amount of nutritive protein administered is selected from about 0.1 g, 0.1-1 g, 1 g, 2 g, 3 g, 4 g, 5 g, 6 g, 7 g, 8 g, 9 g, 10 g, 15 g, 20 g, 25 g, 30 g, 35 g, 40 g, 45 g, 50 g, 55 g, 60 g, 65 g, 70 g, 75 g, 80 g, 85 g, 90 g, 95 g, and 100 g.

[0270] In some embodiments the nutritive protein or nutritive composition is consumed at a rate of from 0.1 g to 1 g a day, 1 g to 5 g a day, from 2 g to 10 g a day, from 5 g to 15 g a day, from 10 g to 20 g a day, from 15 g to 30 g a day, from 20 g to 40 g a day, from 25 g to 50 g a day, from 40 g to 80 g a day, from 50 g to 100 g a day, or more.

[0271] In some embodiments, of the total protein intake by the subject, at least 5%, at least 10%, at least 15%, at least 20%, at least 25%, at least 30%, at least 35%, at least 40%, at least 45%, at least 50%, at least 55%, at least 60%, at least 65%, at least 70%, at least 75%, at least 80%, at least 85%, at least 90%, at least 95%, or about 100% of the total protein intake by the subject over a dietary period is made up of at least one nutritive protein according to this disclosure. In some embodiments, of the total protein intake by the subject, from 5% to 100% of the total protein intake by the subject, from 5% to 90% of the total protein intake by the subject, from 5% to 80% of the total protein intake by the subject, from 5% to 70% of the total protein intake by the subject, from 5% to 60% of the total protein intake by the subject, from 5% to 50% of the total protein intake by the subject, from 5% to 40% of the total protein intake by the subject, from 5% to 30% of the total protein intake by the subject, from 5% to 20% of the total protein intake by the subject, from 5% to 10% of the total protein intake by the subject, from 10% to 100% of the total protein intake by the subject, from 10% to 100% of the total protein intake by the subject, from 20% to 100% of the total protein intake by the subject, from 30% to 100% of the total protein intake by the subject, from 40% to 100% of the total protein intake by the subject, from 50% to 100% of the total protein intake by the subject, from 60% to 100% of the total protein intake by the subject, from 70% to 100% of the total protein intake by the subject, from 80% to 100% of the total protein intake by the subject, or from 90% to 100% of the total protein intake by the subject, over a dietary period, is made up of at least one nutritive protein according to this disclosure. In some embodiments the at least one nutritive protein of this disclosure accounts for at least 5%, at least 10%, at least 15%, at least 20%, at least 25%, at least 30%, at least 35%, at least 40%, at least 45%, or at least 50% of the subject's calorie intake over a dietary period.

[0272] In some embodiments the at least one nutritive protein according to this disclosure comprises at least 2 nutritive proteins of this disclosure, at least 3 nutritive proteins of this disclosure, at least 4 nutritive proteins of this disclosure, at least 5 nutritive proteins of this disclosure, at least 6 nutritive proteins of this disclosure, at least 7 nutritive proteins of this disclosure, at least 8 nutritive proteins of this disclosure, at least 9 nutritive proteins of this disclosure, at least 10 nutritive proteins of this disclosure, or more.

[0273] In some embodiments the dietary period is 1 meal, 2 meals, 3 meals, at least 1 day, at least 2 days, at least 3 days, at least 4 days, at least 5 days, at least 6 days, at least 1 week, at least 2 weeks, at least 3 weeks, at least 4 weeks, at least 1 month, at least 2 months, at least 3 months, at least 4 months, at least 5 months, at least 6 months, or at least 1 year. In some embodiments the dietary period is from 1 day to 1 week, from 1 week to 4 weeks, from 1 month, to 3 months, from 3 months to 6 months, or from 6 months to 1 year.

[0274] Clinical studies provide evidence that protein prevents muscle loss due to aging or bed rest. In particular, studies have shown that protein supplementation increases muscle fractional synthetic rate (FSR) during prolonged bed rest, maintains leg mass and strength during prolonged bed rest, increases lean body mass, improves functional measures of gait and balance, and may serve as a viable intervention for individuals at risk of sarcopenia due to immobility or prolonged bed rest. (See, e.g., Paddon-Jones D, et al. J Clin Endocrinol Metab 2004, 89:4351-4358; Ferrando, A et al. Clinical Nutrition 2009 1-6; Katsanos C et al. Am J Physiol Endocrinol Metab. 2006, 291: 381-387).

[0275] Studies on increasing muscle protein anabolism in athletes have shown that protein provided following exercise promotes muscle hypertrophy to a greater extent than that achieved by exercise alone. It has also been shown that protein provided following exercise supports protein synthesis without any increase in protein breakdown, resulting in a net positive protein balance and muscle mass accretion. While muscle protein synthesis appears to respond in a dose-response fashion to essential amino acid supplementation, not all proteins are equal in building muscle. For example, the amino acid leucine is an important factor in stimulating muscle protein synthesis. (See, e.g., Borscheim E et al. Am J Physiol Endocrinol Metab 2002, 283: E648-E657; Borsheim E et al. Clin Nutr. 2008, 27: 189-95; Esmarck B et al J Physiol 2001, 535: 301-311; Moore D et al. Am J Clin Nutr 2009, 89: 161-8).

[0276] In another aspect this disclosure provides methods of maintaining or increasing at least one of muscle mass, muscle strength, and functional performance in a subject. In some embodiments the methods comprise providing to the subject a sufficient amount of a nutritive protein of this disclosure, a nutritive composition of this disclosure, or a nutritive composition made by a method of this disclosure. In some embodiments the subject is at least one of elderly, critically-medically ill, and suffering from protein-energy malnutrition. In some embodiments the sufficient amount of a nutritive protein of this disclosure, a nutritive composition of this disclosure, or a nutritive composition made by a method of this disclosure is consumed by the subject in coordination with performance of exercise. In some embodiments the nutritive protein of this disclosure, nutritive composition of this disclosure, or nutritive composition made by a method of this disclosure is consumed by the subject by an oral, enteral, or parenteral route.

[0277] In another aspect this disclosure provides methods of maintaining or achieving a desirable body mass index in a subject. In some embodiments the methods comprise providing to the subject a sufficient amount of a nutritive protein of this disclosure, a nutritive composition of this disclosure, or a nutritive composition made by a method of this disclosure. In some embodiments the subject is at least one of elderly, critically-medically ill, and suffering from protein-energy malnutrition. In some embodiments the sufficient amount of a nutritive protein of this disclosure, a nutritive composition of this disclosure, or a nutritive composition made by a method of this disclosure is consumed by the subject in coordination with performance of exercise. In some embodiments the nutritive protein of this disclosure, nutritive composition of this disclosure, or nutritive composition made by a method of this disclosure is consumed by the subject by an oral, enteral, or parenteral route.

[0278] In another aspect this disclosure provides methods of providing protein to a subject with protein-energy malnutrition. In some embodiments the methods comprise providing to the subject a sufficient amount of a nutritive protein of this disclosure, a nutritive composition of this disclosure, or a nutritive composition made by a method of this disclosure. In some embodiments the nutritive protein of this disclosure, nutritive composition of this disclosure, or nutritive composition made by a method of this disclosure is consumed by the subject by an oral, enteral, or parenteral route.

[0279] The need for essential amino acid supplementation has been suggested in cancer patients and other patients suffering from cachexia. Dietary studies in mice have shown survival and functional benefits to cachectic cancer-bearing mice through dietary intervention with essential amino acids. Beyond cancer, essential amino acid supplementation has also shown benefits, such as improved muscle function and muscle gain, in patients suffering from other diseases who have difficulty exercising and therefore suffer from muscular deterioration, such as chronic obstructive pulmonary disease, chronic heart failure, HIV, and other disease states.

[0280] Studies have shown that specific amino acids have advantages in managing cachexia. A relatively high content of BCAAs and Leu in diets are thought to have a positive effect in cachexia by promoting total protein synthesis by signaling an increase in translation, enhancing insulin release, and inhibiting protein degradation. Thus, consuming increased dietary BCAAs in general and/or Leu in particular will contribute positively to reduce or reverse the effects of cachexia. Because nitrogen balance is important in countering the underlying cause of cachexia it is thought that consuming increased dietary glutamine and/or arginine will contribute positively to reduce or reverse the effects of cachexia. (See, e.g., Op den Kamp C, Langen R, Haegens A, Schols A. “Muscle atrophy in cachexia: can dietary protein tip the balance?” Current Opinion in Clinical Nutrition and Metabolic Care 2009, 12:611-616; Poon RT-P, Yu W-C, Fan S-T, et al. “Long-term oral branched chain amino acids in patients undergoing chemoembolization for hepatocellular carcinoma:a randomized trial.” Aliment Pharmacol Ther 2004; 19:779-788; Tayek T A, Bistrian B R, Hehir D J, Martin R, Moldawer L L, Blackburn G L. “Improved protein kinetics and albumin synthesis by branched chain amino acid-enriched total parenteral nutrition in cancer cachexia.” Cancer. 1986; 58: 147-57; Xi P, Jiang Z, Zheng C, Lin Y, Wu G “Regulation of protein metabolism by glutamine: implications for nutrition and health.” Front Biosci. 2011 Jan. 1; 16:578-97).

[0281] Accordingly, also provided herein are methods of treating cachexia in a subject. In some embodiments a sufficient amount of a nutritive protein of this disclosure, a nutritive composition of this disclosure, or a nutritive composition made by a method of this disclosure for a subject with cachexia is an amount such that the amount of protein of this disclosure ingested by the person meets or exceeds the metabolic needs (which are often elevated). A protein intake of 1.5 g/kg of body weight per day or 15-20% of total caloric intake appears to be an appropriate target for persons with cachexia. In some embodiments all of the protein consumed by the subject is a nutritive protein according to this disclosure. In some embodiments nutritive protein according to this disclosure is combined with other sources of protein and/or free amino acids to provide the total protein intake of the subject. In some embodiments the subject is at least one of elderly, critically-medically ill, and suffering from protein-energy malnutrition. In some embodiments the subject suffers from a disease that makes exercise difficult and therefore causes muscular deterioration, such as chronic obstructive pulmonary disease, chronic heart failure, HIV, cancer, and other disease states. In some embodiments, the nutritive protein according to disclosure, the nutritive composition according to disclosure, or the nutritive composition made by a method according to disclosure is consumed by the subject in coordination with performance of exercise. In some embodiments, the nutritive protein according to this disclosure, the nutritive composition according to disclosure, or the nutritive composition made by a method according to disclosure is consumed by the subject by an oral, enteral, or parenteral route.

[0282] Sarcopenia is the degenerative loss of skeletal muscle mass (typically 0.5-1% loss per year after the age of 25), quality, and strength associated with aging. Sarcopenia is a component of the frailty syndrome. The European Working Group on Sarcopenia in Older People (EWGSOP) has developed a practical clinical definition and consensus diagnostic criteria for age-related sarcopenia. For the diagnosis of sarcopenia, the working group has proposed using the presence of both low muscle mass and low muscle function (strength or performance). Sarcopenia is characterized first by a muscle atrophy (a decrease in the size of the muscle), along with a reduction in muscle tissue “quality,” caused by such factors as replacement of muscle fibres with fat, an increase in fibrosis, changes in muscle metabolism, oxidative stress, and degeneration of the neuromuscular junction. Combined, these changes lead to progressive loss of muscle function and eventually to frailty. Frailty is a common geriatric syndrome that embodies an elevated risk of catastrophic declines in health and function among older adults. Contributors to frailty can include sarcopenia, osteoporosis, and muscle weakness. Muscle weakness, also known as muscle fatigue, (or “lack of strength”) refers to the inability to exert force with one's skeletal muscles. Weakness often follows muscle atrophy and a decrease in activity, such as after a long bout of bedrest as a result of an illness. There is also a gradual onset of muscle weakness as a result of sarcopenia.

[0283] The nutritive proteins of this disclosure are useful for treating sarcopenia or frailty once it develops in a subject or for preventing the onset of sarcopenia or frailty in a subject who is a member of an at risk groups. In some embodiments all of the protein consumed by the subject is a nutritive protein according to this disclosure. In some embodiments nutritive protein according to this disclosure is combined with other sources of protein and/or free amino acids to provide the total protein intake of the subject. In some embodiments the subject is at least one of elderly, critically-medically ill, and suffering from protein-energy malnutrition. In some embodiments, the nutritive protein according to disclosure, the nutritive composition according to disclosure, or the nutritive composition made by a method according to disclosure is consumed by the subject in coordination with performance of exercise. In some embodiments, the nutritive protein according to this disclosure, the nutritive composition according to disclosure, or the nutritive composition made by a method according to disclosure is consumed by the subject by an oral, enteral, or parenteral route.

[0284] Obesity is a multifactorial disorder associated with a host of comorbidities including hypertension, type 2 diabetes, dyslipidemia, coronary heart disease, stroke, cancer (eg, endometrial, breast, and colon), osteoarthritis, sleep apnea, and respiratory problems. The incidence of obesity, defined as a body mass index >30 kg/m², has increased dramatically in the United States, from 15% (1976-1980) to 33% (2003-2004), and it continues to grow. Although the mechanisms contributing to obesity are complex and involve the interplay of behavioral components with hormonal, genetic, and metabolic processes, obesity is largely viewed as a lifestyle-dependent condition with 2 primary causes: excessive energy intake and insufficient physical activity. With respect to energy intake, there is evidence that modestly increasing the proportion of protein in the diet, while controlling total energy intake, may improve body composition, facilitate fat loss, and improve body weight maintenance after weight loss. Positive outcomes associated with increased dietary protein are thought to be due primarily to lower energy intake associated with increased satiety, reduced energy efficiency and/or increased thermogenesis, positive effects on body composition (specifically lean muscle mass), and enhanced glycemic control.

[0285] Dietary proteins are more effective in increasing post-prandial energy expenditure than isocaloric intakes of carbohydrates or fat (see, e.g., Dauncey M, Bingham S. “Dependence of 24 h energy expenditure in man on composition of the nutrient intake.” Br J Nutr 1983, 50: 1-13; Karst H et al. “Diet-induced thermogenesis in man: thermic effects of single proteins, carbohydrates and fats depending on their energy amount.” Ann Nutr Metab. 1984, 28: 245-52; Tappy L et al “Thermic effect of infused amino acids in healthy humans and in subjects with insulin resistance.” Am J Clin Nutr 1993, 57 (6): 912-6). This property along with other properties (satiety induction; preservation of lean body mass) make protein an attractive component of diets directed at weight management. The increase in energy expenditure caused by such diets may in part be due to the fact that the energy cost of digesting and metabolizing protein is higher than for other calorie sources. Protein turnover, including protein synthesis, is an energy consuming process. In addition, high protein diets may also up-regulate uncoupling protein in liver and brown adipose, which is positively correlated with increases in energy expenditure. It has been theorized that different proteins may have unique effects on energy expenditure.

[0286] Studies suggest that ingestion of protein, particularly proteins with high EAA and/or BCAA content, leads to distinct effects on thermogenesis and energy expenditure (see, e.g., Mikkelsen P. et al. “Effect of fat-reduced diets on 24 h energy expenditure: comparisons between animal protein, vegetable protein and carbohydrate.” Am J Clin Nutr 2000, 72:1135-41; Acheson K. et al. “Protein choices targeting thermogenesis and metabolism.” Am J Clin Nutr 2011, 93:525-34; Alfenas R. et al. “Effects of protein quality on appetite and energy metabolism in normal weight subjects” Arg Bras Endocrinol Metabol 2010, 54 (1): 45-51; Lorenzen J. et al. “The effect of milk proteins on appetite regulation and diet-induced thermogenesis.” J Clin Nutr 2012 66 (5): 622-7). Additionally, L-tyrosine has been identified as an amino acid that plays a role in thermogenesis (see, e.g., Belza A. et al. “The beta-adrenergic antagonist propranolol partly abolishes thermogenic response to bioactive food ingredients.” Metabolism 2009, 58 (8):1137-44). Further studies suggest that Leucine and Arginine supplementation appear to alter energy metabolism by directing substrate to lean body mass rather than adipose tissue (Dulloo A. “The search for compounds that stimulate thermogenesis in obesity management: from pharmaceuticals to functional food ingredients.” Obes Rev 2011 12: 866-83).

[0287] Collectively the literature suggests that different protein types leads to distinct effects on thermogenesis. Because proteins or peptides rich in EAAs, BCAA, and/or at least one of Tyr, Arg, and Leu are believed to have a stimulatory effect on thermogenesis, and because stimulation of thermogenesis is believed to lead to positive effects on weight management, this disclosure also provides products and methods useful to stimulation thermogenesis and/or to bring about positive effects on weight management in general.

[0288] More particularly, this disclosure provides methods of increasing thermogenesis in a subject. In some embodiments the methods comprise providing to the subject a sufficient amount of a nutritive protein of this disclosure, a nutritive composition of this disclosure, or a nutritive composition made by a method of this disclosure. In some embodiments the subject is obese. In some embodiments, the nutritive protein according to disclosure, the nutritive composition according to disclosure, or the nutritive composition made by a method according to disclosure is consumed by the subject in coordination with performance of exercise. In some embodiments, the nutritive protein according to disclosure, the nutritive composition according to disclosure, or the nutritive composition made by a method according to disclosure is consumed by the subject by an oral, enteral, or parenteral route.

[0289] At the basic level, the reason for the development of an overweight condition is due to an imbalance between energy intake and energy expenditure. Attempts to reduce food at any particular occasion (satiation) and across eating occasions (satiety) have been a major focus of recent research. Reduced caloric intake as a consequence of feeling satisfied during a meal and feeling full after a meal results from a complex interaction of internal and external signals. Various nutritional studies have demonstrated that variation in food properties such as energy density, content, texture and taste influence both satiation and satiety.

[0290] There are three macronutrients that deliver energy: fat, carbohydrates and proteins. A gram of protein or carbohydrate provides 4 calories while a gram of fat 9 calories. Protein generally increases satiety to a greater extent than carbohydrates or fat and therefore may facilitate a reduction in calorie intake. However, there is considerable evidence that indicates the type of protein matters in inducing satiety (see, e.g., W. L. Hall, et al. “Casein and whey exert different effects on plasma amino acid profiles, gastrointestinal hormone secretion and appetite.” Br J Nutr. 2003 February, 89(2):239-48; R. Abou-Samra, et al. “Effect of different protein sources on satiation and short-term satiety when consumed as a starter.” Nutr J. 2011 Dec. 23, 10:139; T. Akhavan, et al. “Effect of premeal consumption of whey protein and its hydrolysate on food intake and postmeal glycemia and insulin responses in young adults.” Am J Clin Nutr. 2010 April, 91(4):966-75, Epub 2010 Feb. 17; MA Veldhorst “Dose-dependent satiating effect of whey relative to casein or soy” Physiol Behav. 2009 Mar. 23, 96(4-5):675-82). Evidence indicates that protein rich in Leucine is particularly effective at inducing satiety (see, e.g., Fromentin G et al “Peripheral and central mechanisms involved in the control of food intake by dietary amino acids and proteins.” Nutr Res Rev 2012 25: 29-39).

[0291] In some embodiments a nutritive protein of this disclosure is consumed by a subject concurrently with at least one pharmaceutical or biologic drug product. In some embodiments the beneficial effects of the nutritive protein and the at least one pharmaceutical or biologic drug product have an additive effect while in some embodiments the beneficial effects of the nutritive protein and the at least one pharmaceutical or biologic drug product have a synergistic effect. Examples of pharmaceutical or biologic drug products that can be administered with the nutritive proteins of this disclosure are well known in the art. For example, when a nutritive protein of this disclosure is used to maintain or increase at least one of muscle mass, muscle strength, and functional performance in a subject, the nutritive protein may be consumed by a subject concurrently with a therapeutic dosage regime of at least one pharmaceutical or biologic drug product indicated to maintain or increase at least one of muscle mass, muscle strength, and functional performance in a subject, such as an anabolic steroid. When a nutritive protein of this disclosure is used to maintain or achieve a desirable body mass index in a subject, the nutritive protein may be consumed by a subject concurrently with a therapeutic dosage regime of at least one pharmaceutical or biologic drug product indicated to maintain or achieve a desirable body mass index in a subject, such as orlistat, lorcaserin, sibutramine, rimonabant, metformin, exenatide, or pramlintide. When a nutritive protein of this disclosure is used to induce at least one of a satiation response and a satiety response in a subject, the nutritive protein may be consumed by a subject concurrently with a therapeutic dosage regime of at least one pharmaceutical or biologic drug product indicated to induce at least one of a satiation response and a satiety response in a subject, such as rimonabant, exenatide, or pramlintide. When a nutritive protein of this disclosure is used to treat at least one of cachexia, sarcopenia and frailty in a subject, the nutritive protein may be consumed by a subject concurrently with a therapeutic dosage regime of at least one pharmaceutical or biologic drug product indicated to treat at least one of cachexia, sarcopenia and frailty, such as omega-3 fatty acids or anabolic steroids.Because of the role of dietary protein in inducing satiation and satiety, the nutritive proteins and nutritive compositions disclosed herein can be used to induce at least one of a satiation response and a satiety response in a subject. In some embodiments the methods comprise providing to the subject a sufficient amount of a nutritive protein of this disclosure, a nutritive composition of this disclosure, or a nutritive composition made by a method of this disclosure. In some embodiments the subject is obese. In some embodiments, the nutritive protein according to disclosure, the nutritive composition according to disclosure, or the nutritive composition made by a method according to disclosure is consumed by the subject in coordination with performance of exercise. In some embodiments, the nutritive protein according to disclosure, the nutritive composition according to disclosure, or the nutritive composition made by a method according to disclosure is consumed by the subject by an oral, enteral, or parenteral route.

[0292] In some embodiments incorporating a least one nutritive protein or nutritive composition of this disclosure into the diet of a subject has at least one effect selected from inducing postprandial satiety (including by suppressing hunger), inducing thermogenesis, reducing glycemic response, positively affecting energy expenditure positively affecting lean body mass, reducing the weight gain caused by overeating, and decreasing energy intake. In some embodiments incorporating a least one nutritive protein or nutritive composition of this disclosure into the diet of a subject has at least one effect selected from increasing loss of body fat, reducing lean tissue loss, improving lipid profile, and improving glucose tolerance and insulin sensitivity in the subject.

### EXAMPLES

[0293] The following examples serve to more fully describe the manner of using the invention. These examples are presented for illustrative purposes and should not serve to limit the true scope of the invention.

### Example 1

### Identification of Protein Fragments Containing Ratios of Essential Amino Acids, Branch Chain Amino Acids, and Leucine Greater than or Equal to Gelatin

[0294] The UniProtKB/Swiss-Prot (a collaboration between the European Bioinformatics Institute and the Swiss Institute of Bioinformatics) is a manually curated and reviewed protein database, and was used as the starting point for protein identification. Proteins from the edible species Solanum lycopersicum, Zea mays, Oryza sativa subsp. Japonica, Glycine max, Ovis aries, Pisum sativum, Spinacia oleracea, Oryza sativa subsp. Indica, Triticum aestivum, Sus scrofa, Prunus persica, Capsicum annuum, Malus domestica, Thunnus albacares, Capra hircus, Cicer arietinum, Salmo salar, Meleagris gallopavo, Solanum tuberosum, and Agaricus bisporus having greater than or equal to fifty (50) amino acids were sampled as targets for this example. Roughly 8,415 such proteins were selected for evaluation and the proteins were then fragmented into roughly fifty (50), roughly one hundred (100), or roughly one hundred and fifty (150) amino acids portions of the original protein, designed to contain digestive enzyme cleavage sites on both ends. The amino acid content, percentage of essential amino acids (“EAA”), the percentage of branched chain amino acids (“BCAA”), the percentage of leucine (“L”), and whether the fragment contained all of the essential amino acids were calculated for each fragment. The SolvScore was also calculated for each fragment. In addition, the fragments were screened against a database of known allergens to determine whether any had greater than 50% global homology to a known allergen. A total of 985 fragments were identified that have a SolvScore of 20 or less and that contain greater than or equal to 19% EAA, greater than or equal to 8% BCAA, and greater than or equal to 4% Leu, and have less than 50% global homology to known allergens (SEQ ID NOS: 1 to 463). (These values were used to identify nutritive fragments of interest in this Example in order to ensure that the identified proteins have a higher content of EAA, BCAA, and Leu than gelatin). For the set of fragments the solvation score at pH 7 (“SolvScore”), aggregation score at pH 7 (“AggScore”), allergenicity (i.e., percent local homology to known allergens, as described herein), toxicity (i.e., percent homology to known toxins, as described herein), anti-nutricity (i.e., percent homology to known protease inhibitors, as described herein), and human homology (i.e., percent homology to known human proteins, as described herein) were calculated, and the total number of Cys residues (“C”) were determined. The characteristics of 200 representative fragments thus identified are presented in Tables 3A and 3B.

TABLE 3A

| Seq | | | | | | |
|---|---|---|---|---|---|---|
| ID No | FragEnds | UniProt | EAA | BCAA | L | C |
| 1 | P15722 | 26:201 | 0.47 | 0.15 | 0.04 | 4 |
| 2 | P49174 | 276:401 | 0.40 | 0.16 | 0.08 | 0 |
| 3 | P15590 | 251:526 | 0.33 | 0.15 | 0.06 | 2 |
| 4 | P15590 | 351:526 | 0.32 | 0.15 | 0.05 | 2 |
| 5 | Q9SP22 | 101:326 | 0.47 | 0.16 | 0.05 | 2 |
| 6 | P15590 | 1:226 | 0.36 | 0.18 | 0.06 | 6 |
| 7 | Q08277 | 626:701 | 0.44 | 0.23 | 0.16 | 0 |
| 8 | P24632 | 26:126 | 0.35 | 0.15 | 0.05 | 0 |
| 9 | Q43143 | 151:326 | 0.48 | 0.20 | 0.08 | 3 |
| 10 | Q8H6A5 | 1:126 | 0.50 | 0.24 | 0.10 | 0 |
| 11 | Q9SP22 | 1:251 | 0.47 | 0.17 | 0.06 | 2 |
| 12 | Q6YSF3 | 101:376 | 0.23 | 0.16 | 0.05 | 1 |
| 13 | P49101 | 251:501 | 0.49 | 0.20 | 0.09 | 1 |
| 14 | Q8GUQ5 | 901:976 | 0.50 | 0.26 | 0.12 | 1 |
| 15 | P27161 | 1:76 | 0.45 | 0.17 | 0.09 | 1 |
| 16 | P41040 | 1:76 | 0.45 | 0.19 | 0.11 | 1 |
| 17 | Q9XHR2 | 526:801 | 0.43 | 0.19 | 0.11 | 1 |
| 18 | P49101 | 351:451 | 0.53 | 0.19 | 0.11 | 0 |
| 19 | Q9XHR2 | 626:801 | 0.44 | 0.17 | 0.12 | 0 |
| 20 | Q9XHR2 | 626:901 | 0.38 | 0.15 | 0.09 | 0 |
| 21 | P15590 | 451:526 | 0.36 | 0.17 | 0.08 | 1 |
| 22 | Q9M4U4 | 1:226 | 0.41 | 0.13 | 0.06 | 1 |
| 23 | P93203 | 126:301 | 0.47 | 0.22 | 0.14 | 0 |
| 24 | P93203 | 126:401 | 0.45 | 0.22 | 0.15 | 1 |
| 25 | Q9SP22 | 101:226 | 0.52 | 0.21 | 0.07 | 2 |
| 26 | Q69SV0 | 276:451 | 0.35 | 0.12 | 0.05 | 0 |
| 27 | Q7Y180 | 1:226 | 0.29 | 0.17 | 0.13 | 3 |
| 28 | P16025 | 501:751 | 0.31 | 0.14 | 0.07 | 2 |
| 29 | P16025 | 601:801 | 0.24 | 0.10 | 0.05 | 0 |
| 30 | Q9XHR2 | 426:701 | 0.48 | 0.23 | 0.10 | 2 |
| 31 | Q9XHR2 | 526:701 | 0.44 | 0.18 | 0.10 | 1 |
| 32 | Q08275 | 1:101 | 0.38 | 0.19 | 0.08 | 0 |
| 33 | Q6YSF3 | 101:276 | 0.26 | 0.17 | 0.06 | 1 |
| 34 | O24591 | 1:226 | 0.41 | 0.13 | 0.06 | 1 |
| 35 | P93203 | 226:501 | 0.44 | 0.23 | 0.16 | 1 |
| 36 | P93203 | 326:501 | 0.43 | 0.23 | 0.16 | 0 |
| 37 | P93203 | 326:601 | 0.43 | 0.23 | 0.15 | 0 |
| 38 | P15590 | 1:126 | 0.29 | 0.13 | 0.05 | 5 |
| 39 | P24631 | 26:101 | 0.34 | 0.18 | 0.04 | 0 |
| 40 | Q95661 | 26:201 | 0.43 | 0.14 | 0.05 | 1 |
| 41 | Q95661 | 126:201 | 0.43 | 0.15 | 0.05 | 0 |
| 42 | P93211 | 1:176 | 0.40 | 0.19 | 0.08 | 1 |
| 43 | Q9XHR2 | 726:901 | 0.33 | 0.14 | 0.08 | 0 |
| 44 | P31541 | 351:626 | 0.44 | 0.22 | 0.09 | 1 |
| 45 | P31541 | 451:626 | 0.42 | 0.20 | 0.08 | 0 |
| 46 | P31541 | 451:726 | 0.42 | 0.20 | 0.08 | 0 |
| 47 | Q10716 | 26:126 | 0.39 | 0.19 | 0.14 | 0 |
| 48 | P16025 | 701:901 | 0.37 | 0.17 | 0.09 | 0 |
| 49 | P93212 | 1:176 | 0.41 | 0.19 | 0.08 | 1 |
| 50 | Q5VQ09 | 401:576 | 0.45 | 0.21 | 0.11 | 1 |
| 51 | Q5VQ09 | 401:676 | 0.43 | 0.21 | 0.11 | 1 |
| 52 | P31541 | 351:426 | 0.46 | 0.25 | 0.12 | 1 |
| 53 | P31542 | 351:426 | 0.46 | 0.25 | 0.12 | 1 |
| 54 | P31541 | 351:526 | 0.43 | 0.23 | 0.11 | 1 |
| 55 | P31542 | 351:526 | 0.42 | 0.24 | 0.11 | 1 |
| 56 | P31541 | 251:526 | 0.44 | 0.24 | 0.11 | 2 |
| 57 | P31542 | 251:526 | 0.44 | 0.24 | 0.11 | 2 |
| 58 | P31541 | 451:526 | 0.40 | 0.20 | 0.10 | 0 |
| 59 | P31541 | 651:851 | 0.49 | 0.22 | 0.10 | 0 |
| 60 | P31542 | 651:851 | 0.48 | 0.23 | 0.11 | 0 |
| 61 | P31542 | 451:526 | 0.38 | 0.21 | 0.11 | 0 |
| 62 | P31542 | 451:726 | 0.43 | 0.21 | 0.08 | 0 |
| 63 | P31542 | 351:626 | 0.43 | 0.23 | 0.10 | 1 |
| 64 | P31542 | 751:826 | 0.49 | 0.27 | 0.13 | 0 |
| 65 | P31541 | 751:826 | 0.50 | 0.25 | 0.11 | 0 |
| 66 | P31542 | 451:626 | 0.42 | 0.21 | 0.09 | 0 |
| 67 | P31542 | 551:626 | 0.45 | 0.22 | 0.05 | 0 |
| 68 | P31541 | 551:626 | 0.46 | 0.22 | 0.04 | 0 |
| 69 | P31541 | 751:926 | 0.45 | 0.25 | 0.10 | 0 |
| 70 | Q9M4U5 | 101:176 | 0.27 | 0.11 | 0.05 | 0 |
| 71 | O24591 | 101:176 | 0.28 | 0.09 | 0.04 | 0 |
| 72 | P16025 | 701:801 | 0.23 | 0.11 | 0.07 | 0 |
| 73 | A1Y2B7 | 501:576 | 0.46 | 0.17 | 0.09 | 1 |
| 74 | A5YVF1 | 551:626 | 0.43 | 0.16 | 0.08 | 0 |
| 75 | P16025 | 601:701 | 0.27 | 0.10 | 0.04 | 0 |
| 76 | Q5VQ09 | 401:476 | 0.37 | 0.18 | 0.10 | 1 |
| 77 | P46605 | 351:426 | 0.33 | 0.13 | 0.07 | 2 |
| 78 | A2ZP58 | 226:301 | 0.35 | 0.15 | 0.10 | 0 |
| 79 | Q9M4U5 | 101:276 | 0.34 | 0.08 | 0.05 | 0 |
| 80 | P31927 | 101:176 | 0.43 | 0.16 | 0.09 | 0 |
| 81 | A1Y2B7 | 401:576 | 0.48 | 0.18 | 0.07 | 1 |
| 82 | P93203 | 526:601 | 0.44 | 0.23 | 0.15 | 0 |
| 83 | A2ZP58 | 226:401 | 0.33 | 0.12 | 0.09 | 0 |
| 84 | Q944N1 | 1:76 | 0.23 | 0.10 | 0.04 | 1 |
| 85 | Q9XHR2 | 526:601 | 0.48 | 0.22 | 0.10 | 1 |
| 86 | Q9FYT6 | 151:226 | 0.38 | 0.19 | 0.09 | 0 |
| 87 | Q9XHR2 | 626:701 | 0.48 | 0.15 | 0.10 | 0 |
| 88 | A5YVF1 | 451:626 | 0.47 | 0.15 | 0.07 | 0 |
| 89 | Q7Y1B6 | 1:76 | 0.40 | 0.12 | 0.07 | 0 |
| 90 | P46605 | 251:426 | 0.32 | 0.13 | 0.05 | 6 |
| 91 | Q9XHR2 | 726:801 | 0.42 | 0.18 | 0.12 | 0 |
| 92 | Q08655 | 1:76 | 0.57 | 0.12 | 0.05 | 0 |
| 93 | A3BMN9 | 1:76 | 0.24 | 0.08 | 0.08 | 3 |
| 94 | Q6YSF3 | 101:176 | 0.34 | 0.21 | 0.13 | 1 |
| 95 | Q9M4U5 | 1:226 | 0.39 | 0.14 | 0.07 | 1 |
| 96 | P37219 | 1:76 | 0.59 | 0.14 | 0.06 | 0 |
| 97 | O22478 | 1:76 | 0.35 | 0.16 | 0.10 | 0 |
| 98 | Q10RE5 | 1:76 | 0.38 | 0.15 | 0.09 | 0 |
| 99 | P48186 | 51:126 | 0.37 | 0.22 | 0.14 | 0 |
| 100 | Q8S4P5 | 426:501 | 0.44 | 0.14 | 0.05 | 1 |
| 101 | P93203 | 226:401 | 0.45 | 0.23 | 0.16 | 1 |
| 102 | Q7Y180 | 101:201 | 0.30 | 0.16 | 0.11 | 3 |
| 103 | Q0DV28 | 576:651 | 0.37 | 0.19 | 0.13 | 2 |
| 104 | P12959 | 201:276 | 0.31 | 0.15 | 0.09 | 1 |
| 105 | P93231 | 1:76 | 0.27 | 0.13 | 0.05 | 1 |
| 106 | P46605 | 351:526 | 0.33 | 0.13 | 0.05 | 2 |
| 107 | A2ZP58 | 126:401 | 0.34 | 0.15 | 0.10 | 0 |
| 108 | P93648 | 301:376 | 0.47 | 0.23 | 0.12 | 1 |
| 109 | P46605 | 251:526 | 0.33 | 0.13 | 0.05 | 6 |
| 110 | Q43704 | 476:551 | 0.36 | 0.15 | 0.06 | 1 |
| 111 | Q9SX04 | 476:551 | 0.36 | 0.15 | 0.06 | 1 |
| 112 | Q9SX03 | 476:551 | 0.36 | 0.15 | 0.06 | 1 |
| 113 | P93203 | 426:601 | 0.44 | 0.23 | 0.15 | 0 |
| 114 | P46605 | 151:426 | 0.35 | 0.16 | 0.07 | 13 |
| 115 | A1L4T4 | 1:76 | 0.40 | 0.15 | 0.06 | 1 |
| 116 | Q9FYT6 | 501:576 | 0.45 | 0.16 | 0.10 | 0 |
| 117 | Q9SP22 | 301:376 | 0.49 | 0.15 | 0.05 | 0 |
| 118 | Q0DV28 | 476:551 | 0.48 | 0.23 | 0.14 | 0 |
| 119 | P56521 | 326:426 | 0.32 | 0.12 | 0.05 | 1 |
| 120 | A1Y2B7 | 301:576 | 0.46 | 0.15 | 0.07 | 2 |
| 121 | P93203 | 226:301 | 0.50 | 0.24 | 0.15 | 0 |
| 122 | A1Y2B7 | 401:476 | 0.47 | 0.18 | 0.05 | 0 |
| 123 | Q8RUN1 | 1:76 | 0.44 | 0.15 | 0.06 | 0 |
| 124 | P56661 | 1:76 | 0.49 | 0.17 | 0.15 | 2 |
| 125 | P93203 | 126:201 | 0.44 | 0.19 | 0.10 | 0 |
| 126 | P55876 | 101:276 | 0.46 | 0.10 | 0.05 | 4 |
| 127 | A2ZP58 | 126:301 | 0.36 | 0.17 | 0.12 | 0 |
| 128 | Q9ARI6 | 426:501 | 0.39 | 0.17 | 0.06 | 1 |
| 129 | Q2MIB4 | 51:126 | 0.35 | 0.21 | 0.12 | 0 |
| 130 | Q8S4P4 | 201:276 | 0.41 | 0.17 | 0.08 | 1 |
| 131 | P37220 | 1:76 | 0.57 | 0.14 | 0.05 | 0 |
| 132 | Q8S4P6 | 226:301 | 0.48 | 0.18 | 0.08 | 3 |
| 133 | Q2MI42 | 701:801 | 0.48 | 0.19 | 0.08 | 0 |
| 134 | P56659 | 1:76 | 0.49 | 0.19 | 0.11 | 0 |
| 135 | Q9XHR2 | 101:176 | 0.45 | 0.21 | 0.13 | 0 |
| 136 | P17703 | 1:76 | 0.52 | 0.18 | 0.11 | 0 |
| 137 | P46605 | 151:226 | 0.41 | 0.22 | 0.10 | 4 |
| 138 | Q0DV28 | 376:451 | 0.49 | 0.17 | 0.06 | 0 |
| 139 | P93212 | 1:76 | 0.40 | 0.19 | 0.06 | 0 |
| 140 | P31927 | 351:426 | 0.43 | 0.22 | 0.11 | 1 |
| 141 | P93647 | 226:301 | 0.47 | 0.25 | 0.14 | 0 |
| 142 | Q944N1 | 1:176 | 0.36 | 0.13 | 0.05 | 2 |
| 143 | P49037 | 1:76 | 0.48 | 0.24 | 0.15 | 1 |
| 144 | O65821 | 1:101 | 0.54 | 0.16 | 0.04 | 0 |
| 145 | Q7XNS7 | 1:76 | 0.38 | 0.21 | 0.14 | 0 |
| 146 | P61242 | 1651:1726 | 0.50 | 0.27 | 0.14 | 0 |
| 147 | Q9S7B2 | 1:76 | 0.37 | 0.18 | 0.10 | 1 |
| 148 | B4FHY0 | 101:176 | 0.43 | 0.21 | 0.08 | 3 |
| 149 | Q43776 | 1:76 | 0.35 | 0.15 | 0.10 | 0 |
| 150 | Q2RAS0 | 1:76 | 0.38 | 0.17 | 0.07 | 0 |
| 151 | Q40170 | 101:176 | 0.43 | 0.22 | 0.15 | 0 |
| 152 | P55876 | 101:176 | 0.44 | 0.14 | 0.07 | 4 |
| 153 | Q2QY12 | 1:76 | 0.37 | 0.17 | 0.07 | 0 |
| 154 | Q9ZSV1 | 751:826 | 0.45 | 0.17 | 0.14 | 1 |
| 155 | Q7XTS3 | 476:551 | 0.43 | 0.15 | 0.08 | 2 |
| 156 | A5YVF1 | 451:526 | 0.56 | 0.17 | 0.07 | 0 |
| 157 | O65818 | 1:101 | 0.54 | 0.15 | 0.04 | 0 |
| 158 | P27347 | 1:101 | 0.49 | 0.09 | 0.04 | 0 |
| 159 | P93203 | 326:401 | 0.41 | 0.22 | 0.16 | 0 |
| 160 | Q9LEF5 | 351:601 | 0.43 | 0.13 | 0.07 | 0 |
| 161 | Q2R1D5 | 1:76 | 0.46 | 0.18 | 0.09 | 0 |
| 162 | Q0DV28 | 376:551 | 0.48 | 0.20 | 0.10 | 0 |
| 163 | P33544 | 1:76 | 0.41 | 0.19 | 0.08 | 2 |
| 164 | P49087 | 376:451 | 0.47 | 0.22 | 0.11 | 0 |
| 165 | 050017 | 351:426 | 0.51 | 0.24 | 0.10 | 0 |
| 166 | P46605 | 451:526 | 0.30 | 0.13 | 0.04 | 0 |
| 167 | Q0DV28 | 476:651 | 0.42 | 0.21 | 0.13 | 2 |
| 168 | P42652 | 1:76 | 0.37 | 0.20 | 0.06 | 0 |
| 169 | Q6ZKC0 | 1:76 | 0.37 | 0.19 | 0.05 | 0 |
| 170 | Q9FYT6 | 151:326 | 0.44 | 0.18 | 0.08 | 1 |
| 171 | P93203 | 426:501 | 0.44 | 0.23 | 0.17 | 0 |
| 172 | O22466 | 1:76 | 0.48 | 0.18 | 0.09 | 0 |
| 173 | P26981 | 301:376 | 0.49 | 0.15 | 0.06 | 2 |
| 174 | P39871 | 126:201 | 0.45 | 0.21 | 0.10 | 0 |
| 175 | Q5BQN5 | 301:376 | 0.55 | 0.17 | 0.08 | 0 |
| 176 | Q9FUY6 | 101:176 | 0.41 | 0.22 | 0.12 | 0 |
| 177 | Q5BQN5 | 101:176 | 0.52 | 0.22 | 0.12 | 0 |
| 178 | Q7XEJ5 | 1:76 | 0.42 | 0.20 | 0.14 | 1 |
| 179 | P93647 | 326:401 | 0.38 | 0.21 | 0.14 | 0 |
| 180 | Q2MI77 | 1:76 | 0.42 | 0.18 | 0.05 | 0 |
| 181 | Q9SDG8 | 501:576 | 0.45 | 0.20 | 0.06 | 2 |
| 182 | P54776 | 1:76 | 0.45 | 0.23 | 0.11 | 0 |
| 183 | Q8LLE5 | 401:476 | 0.42 | 0.19 | 0.13 | 2 |
| 184 | Q2MI98 | 1:76 | 0.41 | 0.16 | 0.11 | 0 |
| 185 | Q43776 | 476:551 | 0.34 | 0.15 | 0.11 | 1 |
| 186 | Q0DV28 | 376:651 | 0.44 | 0.20 | 0.11 | 2 |
| 187 | A2ZP58 | 126:201 | 0.34 | 0.18 | 0.13 | 0 |
| 188 | P46605 | 351:626 | 0.38 | 0.14 | 0.06 | 2 |
| 189 | Q2MIA2 | 1:76 | 0.40 | 0.15 | 0.09 | 1 |
| 190 | Q5JMM1 | 126:201 | 0.38 | 0.18 | 0.09 | 3 |
| 191 | Q50LE0 | 226:326 | 0.51 | 0.21 | 0.09 | 0 |
| 192 | P56668 | 1:76 | 0.48 | 0.15 | 0.12 | 1 |
| 193 | P17801 | 501:576 | 0.43 | 0.17 | 0.08 | 0 |
| 194 | Q43298 | 326:401 | 0.44 | 0.22 | 0.08 | 1 |
| 195 | P10290 | 1:76 | 0.33 | 0.12 | 0.06 | 4 |
| 196 | P08527 | 1:76 | 0.45 | 0.16 | 0.11 | 1 |
| 197 | P49120 | 1:126 | 0.52 | 0.17 | 0.05 | 0 |
| 198 | P56660 | 1:76 | 0.47 | 0.18 | 0.11 | 0 |
| 199 | A3BH85 | 151:226 | 0.45 | 0.17 | 0.09 | 1 |
| 200 | Q65X71 | 1:76 | 0.33 | 0.17 | 0.05 | 0 |

TABLE 3B

| Seq | | | | | | Human |
|---|---|---|---|---|---|---|
| ID | | | Allerge- | Toxic- | Anti- | Homol- |
| No | SolvScore | AggScore | nicity | ity | nutricity | ogy |
| 1 | −25.40 | 0.20 | 0.62 | 0.00 | 0.00 | 0.21 |
| 2 | −26.12 | 0.16 | 0.56 | 0.25 | 0.27 | 0.00 |
| 3 | −25.63 | 0.30 | 0.55 | 0.00 | 0.20 | 0.00 |
| 4 | −26.90 | 0.36 | 0.55 | 0.00 | 0.23 | 0.25 |
| 5 | −28.91 | 0.19 | 0.55 | 0.22 | 0.23 | 0.57 |
| 6 | −28.08 | 0.49 | 0.50 | 0.21 | 0.22 | 0.24 |
| 7 | −27.42 | 0.47 | 0.48 | 0.00 | 0.25 | 0.64 |
| 8 | −27.58 | 0.29 | 0.45 | 0.00 | 0.00 | 0.00 |
| 9 | −25.53 | 0.31 | 0.44 | 0.38 | 0.23 | 0.00 |
| 10 | −26.17 | 0.33 | 0.44 | 0.21 | 0.23 | 0.40 |
| 11 | −26.92 | 0.33 | 0.43 | 0.22 | 0.00 | 0.52 |
| 12 | −40.42 | 0.18 | 0.42 | 0.20 | 0.23 | 0.31 |
| 13 | −25.29 | 0.34 | 0.41 | 0.00 | 0.00 | 0.29 |
| 14 | −25.68 | 0.38 | 0.41 | 0.00 | 0.28 | 0.39 |
| 15 | −25.09 | 0.24 | 0.41 | 0.00 | 0.26 | 0.92 |
| 16 | −25.04 | 0.24 | 0.41 | 0.00 | 0.26 | 0.93 |
| 17 | −35.90 | 0.16 | 0.41 | 0.22 | 0.00 | 0.34 |
| 18 | −25.40 | 0.28 | 0.40 | 0.00 | 0.00 | 0.38 |
| 19 | −34.83 | 0.12 | 0.39 | 0.23 | 0.23 | 0.34 |
| 20 | −34.74 | 0.15 | 0.39 | 0.22 | 0.00 | 0.33 |
| 21 | −33.34 | 0.42 | 0.39 | 0.26 | 0.29 | 0.00 |
| 22 | −33.99 | 0.21 | 0.39 | 0.19 | 0.24 | 0.26 |
| 23 | −31.34 | 0.21 | 0.39 | 0.00 | 0.00 | 0.29 |
| 24 | −32.03 | 0.22 | 0.39 | 0.21 | 0.22 | 0.29 |
| 25 | −25.93 | 0.25 | 0.38 | 0.24 | 0.00 | 0.57 |
| 26 | −25.29 | 0.23 | 0.38 | 0.23 | 0.27 | 0.00 |
| 27 | −28.85 | 0.31 | 0.38 | 0.24 | 0.25 | 0.40 |
| 28 | −33.83 | 0.21 | 0.37 | 0.00 | 0.00 | 0.24 |
| 29 | −41.19 | 0.09 | 0.37 | 0.00 | 0.22 | 0.33 |
| 30 | −29.61 | 0.33 | 0.37 | 0.21 | 0.00 | 0.33 |
| 31 | −36.20 | 0.19 | 0.37 | 0.24 | 0.23 | 0.35 |
| 32 | −26.50 | 0.39 | 0.37 | 0.00 | 0.25 | 0.23 |
| 33 | −36.27 | 0.19 | 0.37 | 0.23 | 0.26 | 0.36 |
| 34 | −34.01 | 0.22 | 0.37 | 0.19 | 0.23 | 0.26 |
| 35 | −31.81 | 0.19 | 0.36 | 0.23 | 0.00 | 0.29 |
| 36 | −30.32 | 0.19 | 0.36 | 0.00 | 0.21 | 0.28 |
| 37 | −31.60 | 0.20 | 0.36 | 0.23 | 0.00 | 0.29 |
| 38 | −34.99 | 0.44 | 0.36 | 0.25 | 0.26 | 0.30 |
| 39 | −25.56 | 0.39 | 0.36 | 0.00 | 0.30 | 0.37 |
| 40 | −25.40 | 0.22 | 0.36 | 0.20 | 0.23 | 0.00 |
| 41 | −32.38 | 0.13 | 0.36 | 0.00 | 0.00 | 0.30 |
| 42 | −25.33 | 0.30 | 0.36 | 0.00 | 0.22 | 0.72 |
| 43 | −34.26 | 0.17 | 0.36 | 0.23 | 0.25 | 0.33 |
| 44 | −29.10 | 0.28 | 0.36 | 0.54 | 0.00 | 0.19 |
| 45 | −30.29 | 0.20 | 0.36 | 0.47 | 0.00 | 0.00 |
| 46 | −26.72 | 0.25 | 0.36 | 0.55 | 0.00 | 0.32 |
| 47 | −26.52 | 0.19 | 0.36 | 0.00 | 0.32 | 0.37 |
| 48 | −34.79 | 0.20 | 0.36 | 0.00 | 0.24 | 0.00 |
| 49 | −27.07 | 0.30 | 0.35 | 0.00 | 0.24 | 0.72 |
| 50 | −32.80 | 0.14 | 0.35 | 0.00 | 0.24 | 0.27 |
| 51 | −29.29 | 0.22 | 0.35 | 0.00 | 0.22 | 0.24 |
| 52 | −27.30 | 0.49 | 0.31 | 0.71 | 0.00 | 0.31 |
| 53 | −27.17 | 0.49 | 0.30 | 0.71 | 0.23 | 0.34 |
| 54 | −29.23 | 0.29 | 0.32 | 0.63 | 0.23 | 0.00 |
| 55 | −28.66 | 0.31 | 0.33 | 0.61 | 0.23 | 0.00 |
| 56 | −26.41 | 0.31 | 0.33 | 0.61 | 0.00 | 0.25 |
| 57 | −26.34 | 0.32 | 0.33 | 0.60 | 0.00 | 0.25 |
| 58 | −32.16 | 0.12 | 0.28 | 0.57 | 0.27 | 0.00 |
| 59 | −25.18 | 0.34 | 0.34 | 0.56 | 0.23 | 0.42 |
| 60 | −26.56 | 0.34 | 0.29 | 0.56 | 0.22 | 0.42 |
| 61 | −30.90 | 0.16 | 0.27 | 0.55 | 0.26 | 0.00 |
| 62 | −26.10 | 0.27 | 0.35 | 0.54 | 0.00 | 0.33 |
| 63 | −28.97 | 0.28 | 0.35 | 0.53 | 0.00 | 0.00 |
| 64 | −27.14 | 0.42 | 0.25 | 0.49 | 0.19 | 0.29 |
| 65 | −26.21 | 0.34 | 0.23 | 0.49 | 0.19 | 0.30 |
| 66 | −30.11 | 0.20 | 0.35 | 0.46 | 0.24 | 0.00 |
| 67 | −27.60 | 0.21 | 0.29 | 0.43 | 0.28 | 0.00 |
| 68 | −27.68 | 0.25 | 0.24 | 0.42 | 0.22 | 0.00 |
| 69 | −25.74 | 0.38 | 0.33 | 0.39 | 0.20 | 0.28 |
| 70 | −43.34 | 0.17 | 0.30 | 0.27 | 0.31 | 0.36 |
| 71 | −43.24 | 0.13 | 0.34 | 0.29 | 0.33 | 0.38 |
| 72 | −42.29 | 0.02 | 0.35 | 0.25 | 0.30 | 0.40 |
| 73 | −40.67 | 0.11 | 0.27 | 0.00 | 0.27 | 0.29 |
| 74 | −40.13 | 0.12 | 0.29 | 0.22 | 0.27 | 0.00 |
| 75 | −39.68 | 0.17 | 0.30 | 0.24 | 0.28 | 0.33 |
| 76 | −37.50 | 0.09 | 0.29 | 0.22 | 0.24 | 0.30 |
| 77 | −36.41 | 0.11 | 0.26 | 0.32 | 0.29 | 0.36 |
| 78 | −35.97 | 0.13 | 0.29 | 0.30 | 0.21 | 0.00 |
| 79 | −35.96 | 0.09 | 0.34 | 0.23 | 0.25 | 0.30 |
| 80 | −35.96 | 0.10 | 0.29 | 0.00 | 0.00 | 0.33 |
| 81 | −35.68 | 0.19 | 0.32 | 0.22 | 0.22 | 0.27 |
| 82 | −35.36 | 0.20 | 0.30 | 0.31 | 0.00 | 0.34 |
| 83 | −35.10 | 0.10 | 0.34 | 0.22 | 0.23 | 0.22 |
| 84 | −34.78 | 0.10 | 0.29 | 0.00 | 0.31 | 0.33 |
| 85 | −34.61 | 0.29 | 0.29 | 0.26 | 0.27 | 0.34 |
| 86 | −34.52 | 0.20 | 0.26 | 0.00 | 0.22 | 0.29 |
| 87 | −34.10 | 0.13 | 0.34 | 0.00 | 0.23 | 0.36 |
| 88 | −34.06 | 0.14 | 0.33 | 0.20 | 0.23 | 0.25 |
| 89 | −33.92 | 0.25 | 0.24 | 0.00 | 0.24 | 0.27 |
| 90 | −33.87 | 0.16 | 0.32 | 0.00 | 0.27 | 0.31 |
| 91 | −33.82 | 0.14 | 0.31 | 0.00 | 0.26 | 0.36 |
| 92 | −33.68 | 0.22 | 0.23 | 0.27 | 0.27 | 0.28 |
| 93 | −33.50 | 0.30 | 0.30 | 0.31 | 0.30 | 0.37 |
| 94 | −32.75 | 0.24 | 0.29 | 0.24 | 0.27 | 0.44 |
| 95 | −32.72 | 0.23 | 0.34 | 0.23 | 0.23 | 0.26 |
| 96 | −32.71 | 0.25 | 0.25 | 0.24 | 0.34 | 0.30 |
| 97 | −32.69 | 0.18 | 0.26 | 0.21 | 0.22 | 0.35 |
| 98 | −32.50 | 0.17 | 0.28 | 0.00 | 0.29 | 0.43 |
| 99 | −32.49 | 0.14 | 0.33 | 0.26 | 0.24 | 0.00 |
| 100 | −32.33 | 0.08 | 0.26 | 0.00 | 0.00 | 0.00 |
| 101 | −32.31 | 0.22 | 0.35 | 0.22 | 0.20 | 0.32 |
| 102 | −32.25 | 0.26 | 0.32 | 0.32 | 0.28 | 0.42 |
| 103 | −32.25 | 0.12 | 0.31 | 0.00 | 0.29 | 0.33 |
| 104 | −32.20 | 0.19 | 0.30 | 0.27 | 0.26 | 0.37 |
| 105 | −32.20 | 0.39 | 0.26 | 0.33 | 0.33 | 0.40 |
| 106 | −32.10 | 0.11 | 0.28 | 0.00 | 0.26 | 0.31 |
| 107 | −32.10 | 0.13 | 0.34 | 0.00 | 0.00 | 0.00 |
| 108 | −32.05 | 0.16 | 0.26 | 0.00 | 0.23 | 0.58 |
| 109 | −32.05 | 0.14 | 0.32 | 0.20 | 0.25 | 0.28 |
| 110 | −31.97 | 0.37 | 0.28 | 0.27 | 0.23 | 0.42 |
| 111 | −31.97 | 0.37 | 0.28 | 0.27 | 0.23 | 0.42 |
| 112 | −31.97 | 0.37 | 0.28 | 0.27 | 0.23 | 0.42 |
| 113 | −31.90 | 0.19 | 0.35 | 0.26 | 0.24 | 0.30 |
| 114 | −31.85 | 0.18 | 0.31 | 0.00 | 0.23 | 0.26 |
| 115 | −31.77 | 0.16 | 0.25 | 0.00 | 0.25 | 0.37 |
| 116 | −31.73 | 0.12 | 0.29 | 0.00 | 0.26 | 0.00 |
| 117 | −31.66 | 0.25 | 0.28 | 0.00 | 0.32 | 0.53 |
| 118 | −31.27 | 0.16 | 0.30 | 0.00 | 0.00 | 0.32 |
| 119 | −31.18 | 0.08 | 0.28 | 0.24 | 0.22 | 0.45 |
| 120 | −31.15 | 0.19 | 0.32 | 0.00 | 0.00 | 0.22 |
| 121 | −31.09 | 0.21 | 0.28 | 0.00 | 0.32 | 0.33 |
| 122 | −31.08 | 0.25 | 0.28 | 0.00 | 0.00 | 0.33 |
| 123 | −31.07 | 0.30 | 0.30 | 0.00 | 0.29 | 0.29 |
| 124 | −31.07 | 0.12 | 0.26 | 0.00 | 0.29 | 0.36 |
| 125 | −31.03 | 0.25 | 0.29 | 0.00 | 0.25 | 0.00 |
| 126 | −30.86 | 0.24 | 0.31 | 0.00 | 0.25 | 0.30 |
| 127 | −30.77 | 0.16 | 0.34 | 0.00 | 0.24 | 0.27 |
| 128 | −30.71 | 0.17 | 0.23 | 0.00 | 0.00 | 0.33 |
| 129 | −30.64 | 0.10 | 0.28 | 0.00 | 0.25 | 0.00 |
| 130 | −30.62 | 0.21 | 0.25 | 0.00 | 0.29 | 0.00 |
| 131 | −30.58 | 0.28 | 0.25 | 0.00 | 0.28 | 0.28 |
| 132 | −30.53 | 0.19 | 0.23 | 0.25 | 0.26 | 0.00 |
| 133 | −30.42 | 0.34 | 0.31 | 0.00 | 0.24 | 0.00 |
| 134 | −30.40 | 0.05 | 0.27 | 0.27 | 0.26 | 0.34 |
| 135 | −30.33 | 0.35 | 0.25 | 0.30 | 0.00 | 0.50 |
| 136 | −30.29 | 0.27 | 0.27 | 0.00 | 0.28 | 0.30 |
| 137 | −30.28 | 0.18 | 0.26 | 0.30 | 0.28 | 0.00 |
| 138 | −30.24 | 0.15 | 0.25 | 0.29 | 0.23 | 0.35 |
| 139 | −30.20 | 0.31 | 0.30 | 0.00 | 0.29 | 0.79 |
| 140 | −30.18 | 0.21 | 0.27 | 0.00 | 0.00 | 0.25 |
| 141 | −30.16 | 0.24 | 0.30 | 0.00 | 0.00 | 0.29 |
| 142 | −30.13 | 0.14 | 0.34 | 0.00 | 0.26 | 0.27 |
| 143 | −30.12 | 0.32 | 0.26 | 0.00 | 0.24 | 0.27 |
| 144 | −30.07 | 0.22 | 0.32 | 0.00 | 0.29 | 0.54 |
| 145 | −30.03 | 0.33 | 0.23 | 0.00 | 0.24 | 0.39 |
| 146 | −30.00 | 0.46 | 0.23 | 0.00 | 0.26 | 0.00 |
| 147 | −29.97 | 0.18 | 0.26 | 0.00 | 0.23 | 0.38 |
| 148 | −29.94 | 0.48 | 0.26 | 0.00 | 0.25 | 0.53 |
| 149 | −29.89 | 0.07 | 0.31 | 0.26 | 0.26 | 0.37 |
| 150 | −29.86 | 0.22 | 0.31 | 0.21 | 0.28 | 0.00 |
| 151 | −29.85 | 0.11 | 0.29 | 0.30 | 0.26 | 0.30 |
| 152 | −29.70 | 0.39 | 0.26 | 0.26 | 0.30 | 0.44 |
| 153 | −29.67 | 0.22 | 0.30 | 0.00 | 0.24 | 0.00 |
| 154 | −29.66 | 0.10 | 0.25 | 0.00 | 0.28 | 0.41 |
| 155 | −29.65 | 0.18 | 0.26 | 0.19 | 0.31 | 0.32 |
| 156 | −29.59 | 0.20 | 0.24 | 0.00 | 0.25 | 0.31 |
| 157 | −29.59 | 0.20 | 0.31 | 0.00 | 0.28 | 0.53 |
| 158 | −29.55 | 0.24 | 0.33 | 0.25 | 0.27 | 0.46 |
| 159 | −29.51 | 0.26 | 0.27 | 0.00 | 0.26 | 0.31 |
| 160 | −29.50 | 0.21 | 0.34 | 0.22 | 0.21 | 0.38 |
| 161 | −29.50 | 0.27 | 0.30 | 0.00 | 0.00 | 0.60 |
| 162 | −29.49 | 0.14 | 0.33 | 0.00 | 0.23 | 0.29 |
| 163 | −29.49 | 0.21 | 0.25 | 0.30 | 0.27 | 0.00 |
| 164 | −29.48 | 0.22 | 0.26 | 0.00 | 0.26 | 0.72 |
| 165 | −29.45 | 0.33 | 0.25 | 0.28 | 0.24 | 0.42 |
| 166 | −29.44 | 0.11 | 0.27 | 0.26 | 0.25 | 0.00 |
| 167 | −29.44 | 0.14 | 0.35 | 0.27 | 0.23 | 0.29 |
| 168 | −29.44 | 0.28 | 0.27 | 0.00 | 0.24 | 0.80 |
| 169 | −29.37 | 0.24 | 0.24 | 0.00 | 0.27 | 0.79 |
| 170 | −29.35 | 0.21 | 0.29 | 0.00 | 0.23 | 0.00 |
| 171 | −29.33 | 0.15 | 0.30 | 0.00 | 0.22 | 0.31 |
| 172 | −29.32 | 0.25 | 0.23 | 0.00 | 0.00 | 0.64 |
| 173 | −29.29 | 0.10 | 0.27 | 0.00 | 0.24 | 0.32 |
| 174 | −29.27 | 0.26 | 0.26 | 0.00 | 0.25 | 0.42 |
| 175 | −29.25 | 0.18 | 0.25 | 0.00 | 0.27 | 0.28 |
| 176 | −29.23 | 0.09 | 0.28 | 0.30 | 0.27 | 0.37 |
| 177 | −29.23 | 0.18 | 0.22 | 0.00 | 0.28 | 0.00 |
| 178 | −29.21 | 0.28 | 0.27 | 0.26 | 0.30 | 0.45 |
| 179 | −29.11 | 0.19 | 0.26 | 0.00 | 0.00 | 0.49 |
| 180 | −29.09 | 0.25 | 0.25 | 0.00 | 0.27 | 0.34 |
| 181 | −29.03 | 0.32 | 0.25 | 0.25 | 0.27 | 0.27 |
| 182 | −29.02 | 0.20 | 0.27 | 0.00 | 0.00 | 0.54 |
| 183 | −29.02 | 0.15 | 0.33 | 0.29 | 0.27 | 0.32 |
| 184 | −29.00 | 0.11 | 0.27 | 0.00 | 0.24 | 0.31 |
| 185 | −28.98 | 0.18 | 0.26 | 0.00 | 0.28 | 0.66 |
| 186 | −28.96 | 0.14 | 0.34 | 0.00 | 0.00 | 0.29 |
| 187 | −28.95 | 0.17 | 0.31 | 0.00 | 0.00 | 0.34 |
| 188 | −28.93 | 0.11 | 0.31 | 0.00 | 0.24 | 0.00 |
| 189 | −28.93 | 0.07 | 0.25 | 0.00 | 0.25 | 0.29 |
| 190 | −28.92 | 0.30 | 0.28 | 0.29 | 0.31 | 0.30 |
| 191 | −28.90 | 0.33 | 0.30 | 0.26 | 0.23 | 0.29 |
| 192 | −28.89 | 0.17 | 0.24 | 0.00 | 0.24 | 0.36 |
| 193 | −28.83 | 0.10 | 0.28 | 0.00 | 0.00 | 0.36 |
| 194 | −28.82 | 0.31 | 0.25 | 0.28 | 0.25 | 0.52 |
| 195 | −28.70 | 0.11 | 0.28 | 0.30 | 0.28 | 0.31 |
| 196 | −28.68 | 0.09 | 0.29 | 0.23 | 0.25 | 0.28 |
| 197 | −28.64 | 0.26 | 0.31 | 0.26 | 0.00 | 0.60 |
| 198 | −28.62 | 0.05 | 0.27 | 0.00 | 0.25 | 0.34 |
| 199 | −28.62 | 0.24 | 0.29 | 0.23 | 0.31 | 0.33 |
| 200 | −28.59 | 0.23 | 0.29 | 0.00 | 0.00 | 0.29 |

### Example 2

### Protein Expression

[0295] Genes encoding nutritive proteins of this disclosure were codon optimized for expression in Escherichia coli and synthesized by either LifeTechnologies/GeneArt or DNA 2.0. Genes were designed to express the native protein or to contain one of two amino-terminal tags to facilitate purification:

(SEQ ID NO: 1057)
MGSHHHHHHHH
(SEQ ID NO: 1056)
MGSSHHHHHHSSGLVPRGSH

[0296] These gene constructs were inserted into the pET15b plasmid vector (Novagen) using NcoI-BamHI restriction sites (in case of the first tag) or using the NdeI-BamHI restriction sites (in the case of the second tag). All restriction enzymes were purchased from New England Biolabs. Plasmids were transformed into Escherichia coli T7 Express (New England Biolabs) and selected on lysogeny broth (LB) plates containing 100 mg/l carbenicillin. A single colony was picked, grown to OD₆₀₀ₙₘ≈0.6 in LB with 100 mg/l carbencillin, and stored as a glycerol stock (in LB with 10% glycerol (v/v)) at −80° C., to serve as a master cell stock.

[0297] 2 ml LB with 100 mg/l carbenicillin (in a 14 mm×100 mm culture tube) was inoculated with a stab from the glycerol stock and grown overnight at 37° C. and 250 rpm. The next day, 2 ml LB with 100 mg/l carbenicillin (in a 14 mm×100 mm culture tube) was inoculated with the overnight culture to OD₆₀₀ₙₘ=0.05 and grown at 30° C. or 37° C. and 250 rpm. At OD₆₀₀ₙₘ≈0.8, heterologous gene-expression was initiated with 1 mM isopropyl β-D-1-thiogalactopyranoside (IPTG) and grown for another 2 hr (when grown at 37° C.) or 4 hr (when grown at 30° C.) until harvest. Upon harvesting, OD₆₀₀ₙₘ was measured, a 1 ml aliquot was centrifuged, and the supernatant was decanted. Cells were re-suspended to OD₆₀₀ₙₘ=1.50 for SDS-PAGE analysis to evaluate expression level. 10 μl of resuspended culture was loaded onto either: 1) a Novex® NuPAGE® 12% Bis-Tris gel (Life Technologies), or 2) a Novex®16% Tricine gel (Life Technologies), and run using standard manufacturer's protocols. Gels were stained using SimplyBlue™ SafeStain (Life Technologies) using the standard manufacturer's protocol and imaged using the Molecular Imager® Gel Doc™ XR+System (Bio-Rad). Over-expressed heterologous protein was identified by comparison against a molecular weight marker and control cultures.

[0298] Using this method, recombinant expression of the proteins listed in Tables 4A and 4B was observed.

TABLE 4A

| Seq ID | | | | | | |
|---|---|---|---|---|---|---|
| No | FragEnds | UniProt | EAA | BCAA | L | C |
| 986 | — | — | 0.50 | 0.41 | 0.16 | 1 |
| 987 | P10587 | 1287:1386 | 0.49 | 0.26 | 0.17 | 0 |
| 988 | Q27991 | 1353:1452 | 0.46 | 0.23 | 0.17 | 0 |
| 989 | — | — | 0.64 | 0.33 | 0.21 | 0 |
| 990 | P02662 | 79:128 | 0.41 | 0.28 | 0.12 | 0 |
| 991 | P02662 | 86:135 | 0.41 | 0.27 | 0.13 | 0 |
| 992 | P33626 | 1:61 | 0.32 | 0.15 | 0.03 | 3 |
| 993 | Q9HD67 | 472:521 | 0.49 | 0.29 | 0.20 | 1 |
| 994 | Q02440 | 461:511 | 0.50 | 0.23 | 0.13 | 1 |
| 995 | Q13402 | 452:509 | 0.52 | 0.24 | 0.11 | 1 |
| 996 | Q29092 | 703:803 | 0.32 | 0.13 | 0.08 | 0 |
| 997 | Q29092 | 704:803 | 0.32 | 0.14 | 0.08 | 0 |
| 998 | Q02440 | 413:512 | 0.52 | 0.22 | 0.09 | 2 |
| 999 | Q28970 | 427:527 | 0.51 | 0.21 | 0.10 | 1 |
| 1000 | Q95M18 | 118:318 | 0.46 | 0.20 | 0.08 | 1 |
| 1001 | P08110 | 120:321 | 0.48 | 0.19 | 0.07 | 1 |
| 1002 | Q27991 | 1396:1446 | 0.49 | 0.31 | 0.23 | 0 |
| 1003 | P19524 | 1398:1449 | 0.56 | 0.25 | 0.18 | 2 |
| 1004 | Q03262 | 225:277 | 0.65 | 0.30 | 0.13 | 1 |
| 1005 | P32492 | 1218:1319 | 0.67 | 0.25 | 0.14 | 1 |
| 1006 | P79114 | 688:788 | 0.48 | 0.26 | 0.15 | 2 |
| 1007 | Q5MIB5 | 492:592 | 0.53 | 0.27 | 0.14 | 2 |
| 1008 | P04119 | 28:129 | 0.51 | 0.26 | 0.17 | 2 |
| 1009 | Q5ZMN0 | 1:146 | 0.53 | 0.30 | 0.21 | 2 |
| 1010 | Q5ZMN0 | 1:147 | 0.52 | 0.30 | 0.21 | 2 |
| 1011 | Q5ZMN0 | 1:148 | 0.53 | 0.30 | 0.21 | 2 |
| 1012 | Q5ZMN0 | 1:149 | 0.52 | 0.29 | 0.21 | 2 |
| 1013 | Q5ZMN0 | 1:150 | 0.52 | 0.29 | 0.21 | 2 |
| 1014 | Q5ZMN0 | 1:151 | 0.52 | 0.29 | 0.20 | 2 |
| 1015 | Q5ZMN0 | 1:152 | 0.51 | 0.29 | 0.20 | 2 |
| 1016 | Q5ZMN0 | 1:153 | 0.51 | 0.29 | 0.20 | 2 |
| 1017 | Q5ZMN0 | 1:154 | 0.51 | 0.28 | 0.20 | 2 |
| 1018 | Q5ZMN0 | 1:161 | 0.49 | 0.27 | 0.19 | 2 |
| 1019 | Q9JLT0 | 127:231 | 0.48 | 0.21 | 0.15 | 0 |
| 1020 | Q27991 | 141:190 | 0.51 | 0.28 | 0.23 | 0 |
| 1021 | Q27991 | 136:185 | 0.51 | 0.28 | 0.21 | 0 |
| 1022 | Q27991 | 116:185 | 0.51 | 0.27 | 0.21 | 0 |
| 1023 | Q27991 | 146:200 | 0.51 | 0.29 | 0.21 | 0 |
| 1024 | Q27991 | 146:210 | 0.52 | 0.27 | 0.20 | 0 |
| 1025 | Q27991 | 136:190 | 0.50 | 0.27 | 0.21 | 0 |
| 1026 | Q27991 | 146:195 | 0.50 | 0.30 | 0.21 | 0 |
| 1027 | Q27991 | 126:190 | 0.52 | 0.26 | 0.19 | 0 |
| 1028 | Q27991 | 141:200 | 0.51 | 0.28 | 0.21 | 0 |
| 1029 | Q27991 | 161:210 | 0.50 | 0.24 | 0.19 | 0 |
| 1030 | Q27991 | 126:185 | 0.53 | 0.27 | 0.19 | 0 |
| 1031 | Q27991 | 111:210 | 0.50 | 0.26 | 0.19 | 0 |
| 1032 | Q27991 | 116:215 | 0.50 | 0.26 | 0.18 | 0 |
| 1033 | Q27991 | 126:225 | 0.46 | 0.22 | 0.15 | 0 |
| 1034 | Q27991 | 126:237 | 0.45 | 0.21 | 0.15 | 0 |
| 1035 | Q9JLT0 | 194:244 | 0.45 | 0.20 | 0.14 | 0 |
| 1036 | Q61879 | 154:252 | 0.41 | 0.19 | 0.14 | 0 |
| 1037 | Q90339 | 201:265 | 0.45 | 0.21 | 0.18 | 0 |
| 1038 | Q9BE41 | 216:265 | 0.48 | 0.21 | 0.18 | 0 |
| 1039 | Q9TV62 | 241:290 | 0.48 | 0.17 | 0.15 | 0 |
| 1040 | Q5SX39 | 236:285 | 0.45 | 0.19 | 0.17 | 0 |
| 1041 | Q9TV61 | 151:265 | 0.52 | 0.21 | 0.16 | 0 |
| 1042 | Q9TV61 | 102:344 | 0.44 | 0.19 | 0.12 | 2 |
| 1043 | Q27991 | 20:289 | 0.38 | 0.20 | 0.15 | 0 |
| 1044 | Q0WVK7 | 53:105 | 0.57 | 0.27 | 0.12 | 2 |
| 1045 | Q94A52 | 149:261 | 0.54 | 0.26 | 0.12 | 2 |
| 1046 | P38111 | 1093:1165 | 0.59 | 0.30 | 0.13 | 3 |
| 1047 | P38111 | 1093:1182 | 0.57 | 0.27 | 0.13 | 3 |
| 1048 | P38111 | 1093:1162 | 0.57 | 0.27 | 0.13 | 3 |
| 1049 | P38111 | 1092:1166 | 0.59 | 0.29 | 0.13 | 3 |
| 1050 | P38111 | 1093:1168 | 0.58 | 0.29 | 0.13 | 3 |
| 1051 | P38111 | 1091:1164 | 0.59 | 0.30 | 0.13 | 3 |
| 1052 | P38111 | 1089:1164 | 0.58 | 0.29 | 0.13 | 3 |

TABLE 4B

| Seq | | | | | | Human |
|---|---|---|---|---|---|---|
| ID | | | Allerge- | Toxic- | Anti- | Homol- |
| No | SolvScore | AggScore | nicity | ity | nutricity | ogy |
| 986 | −21.97 | 1.00 | 0.30 | 0.00 | 0.25 | 0.39 |
| 987 | −28.44 | 0.16 | 0.36 | 0.00 | 0.00 | 0.84 |
| 988 | −36.33 | 0.16 | 0.33 | 0.00 | 0.00 | 0.87 |
| 989 | −27.36 | 0.49 | 0.34 | 0.00 | 0.30 | 0.41 |
| 990 | −24.84 | 0.25 | 0.63 | 0.26 | 0.00 | 0.35 |
| 991 | −26.10 | 0.22 | 0.63 | 0.26 | 0.00 | 0.33 |
| 992 | −24.13 | 0.24 | 0.52 | 0.32 | 0.31 | 0.71 |
| 993 | −25.30 | 0.46 | 0.22 | 0.33 | 0.34 | 1.00 |
| 994 | −22.49 | 0.43 | 0.21 | 0.31 | 0.35 | 0.94 |
| 995 | −22.06 | 0.51 | 0.21 | 0.28 | 0.27 | 1.00 |
| 996 | −38.34 | 0.23 | 0.35 | 0.26 | 0.33 | 0.91 |
| 997 | −37.93 | 0.23 | 0.35 | 0.26 | 0.33 | 0.91 |
| 998 | −21.01 | 0.41 | 0.31 | 0.00 | 0.28 | 0.94 |
| 999 | −23.16 | 0.43 | 0.28 | 0.00 | 0.00 | 0.98 |
| 1000 | −26.58 | 0.34 | 0.59 | 0.00 | 0.22 | 0.98 |
| 1001 | −27.93 | 0.29 | 0.61 | 0.00 | 0.25 | 0.93 |
| 1002 | −31.57 | 0.29 | 0.21 | 0.00 | 0.31 | 0.88 |
| 1003 | −20.09 | 0.24 | 0.21 | 0.29 | 0.30 | 0.43 |
| 1004 | −19.93 | 0.52 | 0.22 | 0.32 | 0.32 | 0.33 |
| 1005 | −21.64 | 0.55 | 0.26 | 0.26 | 0.26 | 0.00 |
| 1006 | −24.45 | 0.54 | 0.32 | 0.24 | 0.25 | 0.91 |
| 1007 | −23.71 | 0.37 | 0.30 | 0.27 | 0.29 | 0.93 |
| 1008 | −22.23 | 0.52 | 0.74 | 0.00 | 0.19 | 0.44 |
| 1009 | −22.65 | 0.39 | 0.32 | 0.25 | 0.25 | 0.76 |
| 1010 | −22.50 | 0.39 | 0.32 | 0.25 | 0.25 | 0.76 |
| 1011 | −22.35 | 0.39 | 0.32 | 0.25 | 0.26 | 0.76 |
| 1012 | −22.74 | 0.39 | 0.32 | 0.00 | 0.25 | 0.76 |
| 1013 | −22.59 | 0.39 | 0.32 | 0.00 | 0.25 | 0.75 |
| 1014 | −22.97 | 0.38 | 0.32 | 0.24 | 0.25 | 0.76 |
| 1015 | −23.34 | 0.38 | 0.32 | 0.24 | 0.25 | 0.75 |
| 1016 | −23.25 | 0.38 | 0.32 | 0.24 | 0.25 | 0.75 |
| 1017 | −23.61 | 0.37 | 0.32 | 0.00 | 0.25 | 0.75 |
| 1018 | −24.11 | 0.36 | 0.32 | 0.23 | 0.26 | 0.75 |
| 1019 | −33.59 | 0.15 | 0.34 | 0.25 | 0.00 | 1.00 |
| 1020 | −36.26 | 0.21 | 0.21 | 0.29 | 0.33 | 0.92 |
| 1021 | −34.27 | 0.27 | 0.22 | 0.25 | 0.00 | 0.90 |
| 1022 | −32.73 | 0.22 | 0.25 | 0.31 | 0.00 | 0.87 |
| 1023 | −34.50 | 0.23 | 0.21 | 0.00 | 0.00 | 0.89 |
| 1024 | −34.08 | 0.25 | 0.26 | 0.00 | 0.00 | 0.91 |
| 1025 | −34.67 | 0.22 | 0.23 | 0.25 | 0.00 | 0.91 |
| 1026 | −33.39 | 0.29 | 0.20 | 0.00 | 0.31 | 0.88 |
| 1027 | −37.57 | 0.19 | 0.25 | 0.31 | 0.00 | 0.92 |
| 1028 | −35.42 | 0.21 | 0.24 | 0.21 | 0.00 | 0.90 |
| 1029 | −33.68 | 0.26 | 0.23 | 0.00 | 0.00 | 0.92 |
| 1030 | −37.47 | 0.23 | 0.25 | 0.00 | 0.00 | 0.92 |
| 1031 | −33.38 | 0.20 | 0.31 | 0.00 | 0.00 | 0.87 |
| 1032 | −32.78 | 0.18 | 0.33 | 0.27 | 0.29 | 0.88 |
| 1033 | −36.89 | 0.16 | 0.35 | 0.00 | 0.00 | 0.92 |
| 1034 | −37.66 | 0.15 | 0.39 | 0.00 | 0.00 | 0.93 |
| 1035 | −29.21 | 0.16 | 0.25 | 0.00 | 0.27 | 1.00 |
| 1036 | −30.24 | 0.12 | 0.33 | 0.00 | 0.00 | 0.99 |
| 1037 | −34.37 | 0.07 | 0.29 | 0.00 | 0.00 | 0.98 |
| 1038 | −38.56 | 0.08 | 0.24 | 0.00 | 0.00 | 0.98 |
| 1039 | −41.59 | 0.04 | 0.26 | 0.00 | 0.00 | 0.98 |
| 1040 | −40.29 | 0.04 | 0.23 | 0.28 | 0.00 | 0.98 |
| 1041 | −35.70 | 0.11 | 0.36 | 0.26 | 0.22 | 0.99 |
| 1042 | −37.24 | 0.08 | 0.37 | 0.22 | 0.00 | 0.98 |
| 1043 | −34.97 | 0.13 | 0.40 | 0.23 | 0.22 | 0.93 |
| 1044 | −26.91 | 0.45 | 0.18 | 0.30 | 0.22 | 0.31 |
| 1045 | −25.52 | 0.46 | 0.29 | 0.00 | 0.25 | 0.81 |
| 1046 | −23.00 | 0.80 | 0.27 | 0.00 | 0.24 | 0.26 |
| 1047 | −20.82 | 0.80 | 0.27 | 0.00 | 0.25 | 0.27 |
| 1048 | −23.98 | 0.70 | 0.25 | 0.27 | 0.25 | 0.27 |
| 1049 | −22.45 | 0.79 | 0.27 | 0.27 | 0.25 | 0.25 |
| 1050 | −22.10 | 0.80 | 0.27 | 0.28 | 0.24 | 0.25 |
| 1051 | −22.75 | 0.77 | 0.28 | 0.31 | 0.25 | 0.25 |
| 1052 | −23.28 | 0.71 | 0.28 | 0.28 | 0.25 | 0.24 |

### Example 3

### Scaled Up Production of Recombinant Nutritive Proteins

[0299] A representative protocol for producing quantities of nutritive proteins as described in this disclosure is as follows.

[0300] 5 ml LB with 100 mg/l carbenicillin (in a 50 ml baffled Pyrex shake flask) is inoculated with a stab from the glycerol stock of a recombinant E. coli strain comprising a recombinant gene encoding a nutritive protein and grown until late exponential phase (OD600 nm≈2) at 37° C. and 250 rpm. A 2.51 Ultra Yield Flask (Thomson Instrument Company) is inoculated with 500 ml sterile water and enough EnBase EnPresso™ tablets (BioSilta) to formulate 500 ml growth medium. This medium is supplemented with 100 mg/l carbenicillin, 0.001% Industrol 204 antifoam, and 0.6 U/l EnzI'm (BioSilta). The shake flask is inoculated to OD600 nm=0.05 and grown 16 hr at 30° C. and 250 rpm. The growth medium is supplemented with EnPresso™ Booster tablets (BioSilta), 1.2 U/l EnzI'm, and 1 mM IPTG to induce heterologous protein production. After another 8-24 hr of shaking at 30° C. and 250 rpm, the flask is harvested by centrifugation, the supernatant is decanted, and the wet cell weight was measured. Approximately 20 gWCW (grams wet cell weight)/l medium is typically recovered at this stage.

[0301] The harvested cells from each shake-flask fermentation are suspended in 25 mL of IMAC Equilibration Solution (30 mM Imidazole, 50 mM Phosphate, 0.5 M NaCl, pH 7.5). The suspended cells are then lysed by sonication on ice. The lysed cells are centrifuged for 60 minutes and decanted. The cell debris is discarded, and the supernatants are 0.2 μm filtered. Filters are then flushed with an additional 10 mL of IMAC Equilibration Solution. These filtered protein solutions are then purified by immobilized metal affinity chromatography (IMAC).

[0302] IMAC resin (GE Healthcare, IMAC Sepharose 6 Fast Flow) is charged with nickel and equilibrated. 30 mL of each protein solution is loaded onto a 5 mL IMAC column, and washed with additional equilibration solution to remove unbound impurities. The protein of interest is then eluted with 15 mL of 0.5 M NaCl, 0.2 M Imidazole, pH 7.5. At this stage, the purified proteins are typically shown to be at least 90% pure by SDS-PAGE. Approximately 20 to 60 mg of each protein is recovered in the IMAC elution fractions. Each IMAC elution fraction is buffer exchanged by dialysis into a formulation solution (20 mM HEPES, pH 7.5). After buffer exchange, the protein solutions are recovered for all downstream processing.

### Example 4

### Prediction of Soluble Expression of Nutritive Proteins

[0303] Open reading frames encoding a set of 292 nutritive proteins were cloned and introduced into E. coli to assess recombinant protein expression using the method of Example 2. In the system used, 163 proteins were identified as expressed while 129 were not. Of the 163 proteins that expressed, 125 were tested for soluble expression. It was found that 75 were solubly expressed while 50 were not.

[0304] FIG. 1 shows a two dimensional histogram of protein expression in the E. coli expression screen. FIG. 1 shows the relative likelihood (on a log scale) of a protein being expressed as a function of solvation score (y-axis) and aggregation score (x-axis). A darker mark on the histogram indicates a higher number of proteins expressed, while a lighter mark indicates a fewer number of proteins expressed. FIG. 1 shows that those proteins that were successfully expressed tend to cluster in the top left region of the plot, where the solvation score is more negative (≦−20) and the aggregation score is smaller (≦0.75). There were few examples of proteins that were successfully expressed with less negative solvation scores (≧−15) and large aggregation scores (≧1). This result suggests that nutritive proteins with solvation scores of −20 or less and aggregation scores of 0.75 or less are more likely to be expressed in this system.

[0305] FIG. 2 shows a two dimensional histogram of the number of soluble protein expression in the E. coli expression screen. FIG. 2 shows the relative likelihood (on a log scale) of a protein being solubly expressed as a function of solvation score (y-axis) and aggregation score (x-axis). Again, a darker mark on the histogram indicates a higher number of proteins expressed, while a lighter mark indicates a fewer number of proteins expressed. FIG. 2 shows that those proteins that were expressed solubly tended to cluster in the top left region of the plot, where the solvation score is more negative (≦−20) and the aggregation score is smaller (≦0.5). There were few examples of proteins that were expressed solubly with less negative solvation scores (≧−15) and large aggregation scores (≧0.75). This result suggests that nutritive proteins with solvation scores of −20 or less and aggregation scores of 0.5 or less are more likely to be solubly expressed in this system.

### Example 5

### Solubility Screening

[0306] The solubility of nine nutritive proteins produced as described Examples 2 and 3 was examined by centrifuge concentration followed by protein concentration assays. Samples in 20 mM HEPES pH 7.5 were tested for protein concentration according to the protocol for Coomassie Plus (Bradford) Protein Assay (Thermo Scientific) and absorbance at 280 nm (if applicable). Based on these measurements 10 mg of protein was added to an Amicon Ultra 3 kDa centrifugal filter (Millipore). Samples were concentrated by centrifugation at 10,000×g for 30 minutes. The final concentrated samples were examined for precipitated protein and color, and then tested for protein concentration as described above. The results are shown in Table 5.

TABLE 5

| Seq ID No | Appearance | Concentration (g/L) |
|---|---|---|
| 1025 | Clear Faint Yellow | 44 |
| 1027 | Clear Faint Yellow | 166 |
| 1032 | Clear Colorless | 107 |
| 1037 | Clear Colorless | 60 |
| 1038 | Clear Colorless | 29 |
| 1040 | Clear Colorless | 151 |
| 1041 | Clear Colorless | 207 |
| 1043 | Clear Yellow | 95 |
| 1046 | Clear Yellow | 191 |

[0307] The solubilities of these nutritive proteins were found to be significantly higher than concentrations typically found for whey (12.5 g/L) and soy (10 g/L) (Pelegrine, D. H. G. & Gasparetto, C. A., 2005. Whey proteins solubility as function of temperature and pH. LWT—Food Science and Technology, p. 77-80; Lee, K. H., Ryu, H. S. & and Rhee, K. C., 2003. Protein solubility characteristics of commercial soy protein products. Journal of the American Oil Chemists' Society, pp. 85-90). This demonstrates the usefulness of the nutritive proteins disclosed herein. For example, the solubility of nutritive proteins may improve compliant delivery of high quality protein in as small of a volume as possible while avoiding the “chalkyness” that often characterizes proteins delivered in this manner. This may, for example, be useful to deliver proteins to the elderly or other subjects.

### Example 6

### Stability Screening

[0308] Thermal stability of nutritive proteins provides insight regarding whether the protein is likely to have a useful shelf life. Samples of proteins produced as described in Examples 2 and 3 were screened in parallel using a rapid thermal stability screening method. In this method proteins were heated slowly from 25° C. to 95° C. in two representative formulations in the presence of a hydrophobic dye (Enzo Life Sciences, ProteoStat® Thermal shift stability assay kit) that binds to aggregated proteins that form as the protein denatures with increasing temperature (Niesen, F. H., Berglund, H. & Vadadi, M., 2007. The use of differential scanning fluorimetry to detect ligand interactions that promote protein stability. Nature Protocols, Volume 2, pp. 2212-2221.). Upon binding, the dye's fluorescence increases significantly, which is then recorded by the rtPCR instrument and represented as the protein's melting curve (Lavinder, J. J., Hari, S. B., Suillivan, B. J. & Magilery, T. J., 2009. High-Throughput Thermal Scanning: A General, Rapid Dye-Binding Thermal Shift Screen for Protein Engineering. Journal of the American Chemical Society, pp. 3794-3795.). After the thermal shift is complete samples were examined for insoluble precipitates and further analyzed by analytical size exclusion chromatography (SEC).

[0309] Protein solutions (12.5 mg/ml) were prepared in both PBS and 20 mM HEPES pH 7.7 buffers, each containing 1× ProteoStat TS Detection Reagent. Samples of each solution were heated slowly from 25° C.-95° C., 0.5° C./30 seconds using a real-time PCR (rtPCR) thermocycler while monitoring the fluorescence of the dye. From this thermal scan the temperature of aggregation was determined (T_{agg}) from the temperature with the strongest slope if an increase in fluorescence was observed. To supplement the assay, samples were taken before and after the thermal shift and analyzed by SEC (GE Healthcare—Superdex 75 5/150) which can detect large soluble aggregates. The results for three nutrive proteins of this disclosure and a whey standard are presented in Table 6. The presence of soluble aggregates detected by SEC is noted by a “yes” if observed or “no” if not observed, and the “n/a” entries for the whey standard indicate the production of insoluble precipitates such that no SEC analysis was performed. For the nutritive proteins a “-” indicates that the assay was not performed.

TABLE 6

| | HEPES - | PBS - | HEPES - | PBS - |
|---|---|---|---|---|
| Seq ID No | T_{agg} | T_{agg} | SEC Agg? | SEC Agg? |
| 1027 | 95 | 95 | No | No |
| 1032 | 95 | 95 | No | No |
| 1033 | 45 | 95 | No | No |
| 1040 | 95 | 95 | No | No |
| 1041 | 95 | 95 | No | No |
| 1043 | 95 | 95 | Yes | Yes |
| 1046 | 95 | 95 | Yes | Yes |
| whey | 79 | 81.5 | n/a | n/a |

[0310] As shown in Table 10, many of the proteins have a higher HEPES T_{agg} than whey and most do not form any aggregates at 95° C. (which was the upper limit of the assay), and thus are expected to be more stable than whey.

### Example 7

### Digestibility Screening—Determination of Digestion Half-Life

[0311] The goal of screening for protein digestibility is to eliminate potentially unsafe allergenic proteins and to determine the relative completeness of digestion as a predictor of peptide bioavailability. This screening method utilizes a physiologically relevant in vitro digestion reaction that includes both phases of protein digestion, simulated gastric digestion and simulated intestinal digestion (Moreno, J. F. et al., 2005. Stability of the major allergen Brazil nut 2S albumin (Ber e 1) to physiologically relevant in vitro gastrointestinal digestion. FEBS Journal, pp. 341-352.). Samples can be taken throughout the reaction and analyzed for intact protein and peptide fragments using chip electrophoresis and LC-QTOF-MS. Proteins with allergenic properties can be assessed by identifying proteins or large fragments of proteins that are resistant to digestive proteases and thus have a higher risk of causing an allergenic reaction (Goodman, R. E. et al., 2008. Allergenicity assessment of genetically modified crops—what makes sense?. Nature Biotechnology, pp. 73-81.). Digestibility is measured by determining how efficiently the protein is broken down into peptides (Daniel, H., 2003. Molecular and Integrative Physiology of Intestinal Peptide Transport Annual Review of Physiology, Volume 66, pp. 361-384.).

[0312] The method used an automated assay for in vitro digestions of proteins wherein assay conditions and protease concentrations are physiologically relevant (Moreno, F. J., Mackie, A. R. & Clare Mills, E. N., 2005. Phospholipid interactions protect the milk allergen a-Lactalbumin from proteolysis during in vitro digestion. Journal of agricultural and food chemistry, pp. 9810-9816; Martos, G., Contreras, P., Molina, E. & Lopez-Fandino, R., 2010. Egg White Ovalbumin Digestion Mimicking Physiological Conditions. Journal of Agricultural and food chemistry, pp. 5640-5648; Moreno, J. F. et al., 2005. Stability of the major allergen Brazil nut 2S albumin (Ber e 1) to physiologically relevant in vitro gastrointestinal digestion. FEBS Journal, pp. 341-352.). The first phase of digestion is in simulated gastric fluid (SGF) and formulated at pH 1.5 and with a pepsin:substrate ratio of (1:10 w/w). The second phase of digestion is in simulated intestinal fluid (SIF) is formulated with bile salts at pH 6.5 and with an trypsin:chymotrypsin:substrate ratio of (1:4:400 w/w). The protein is treated for 120 mins in the simulated gastric fluid, which is how long it takes for 90% of a liquid meal to pass from the stomach to the small intestine (Kong, F. & Singh, R. P., 2008. Disintegration of Solid Foods in Human Stomach. Journal of Food Science, pp. 67-80), and then treated with simulated intestinal fluid for 120 mins. Sample time points are taken throughout both reactions and quenched for analysis. Bovine serum albumin, which is readily digested by pepsin, is the positive control for the SGF solution, and beta-lactoglobulin, which is naturally resistant to pepsin but digested in SIF, is the positive control for SIF solution. Intact protein and large fragments were detected using electrophoresis. For chip electrophoresis, a Caliper Labchip GXII equipped with a HT Low MW Protein Assay Kit was used to monitor the size and amount of intact protein as well as any digestion fragments larger than 4 kDa. By monitoring the amount of intact protein observed over time, the half-life (τ_{1/2}) of digestion was calculated for SGF and, if intact protein is detected after SGF digestion, in SIF.

[0313] This method was used to analyze the digestion half-lives of eleven nutritive proteins of this disclosure produced as described in Examples 6 and 7, as well as native and recombinant ovalbumin (OVA and rOVA, respectively; SEQ ID NO: 1053) and beta-lactoglobulin (BLG and rBLG, respectively; SEQ ID NO: 1054) proteins and a whey standard. The results of these experiments are summarized in Table 7. An “n/a” entry in the Simulated Intestinal Fluid field indicates that no intact protein was detected after SGF digestion.

TABLE 7

| | Digestion τ_{1/2} (min.) | |
|---|---|---|
| Seq ID No. | Simulated Gastric Fluid | Simulated Intestinal Fluid |
| 1004 | 0.3 | n/a |
| 1020 | 0.3 | n/a |
| 1023 | 2 | n/a |
| 1025 | 6 | n/a |
| 1027 | 0.5 | n/a |
| 1032 | 0.7 | n/a |
| 1037 | 10 | n/a |
| 1038 | 0.6 | n/a |
| 1040 | 0.7 | n/a |
| 1041 | 0.3 | n/a |
| 1043 | 29 | 1 |
| 1045 | 1 | n/a |
| 1046 | 6 | n/a |
| BLG (1054) | 77 | 4 |
| rBLG (1054) | 50 | 0.7 |
| OVA (1053) | 18 | 1 |
| rOVA (1053) | 5 | n/a |
| whey | 99 | 4 |

[0314] The results shown in Table 7 indicate that twelve of the thirteen nutritive proteins of this disclosure were all completely digested by SGF and have SGF half lives of ten minutes or less. By comparison whey is not completely digested by SGF and has an SGF half life of 99 minutes and a SIF half life of 4 minutes. This study suggests that the nutritive proteins of this disclosure are likely to be readily digested and not likely to elicit an allergic response when ingested.

[0315] The results in Table 7 also show that the recombinant beta-lactoglobulin and ovalbumin produced according to this disclosure were both more readily digested than their naturally-occurring counterparts. The speed in which a protein is broken down can be controlled by selecting for properties that improve or limit accessibility of the gastrointestinal proteases. This capability can be demonstrated for two typical protein properties, glycosylation and disulfide cross-linking Like many naturally occurring proteins, naturally occurring OVA and BLG are glycosylated by their host organisms. In contrast, the recombinant proteins produced according to the present disclosure are not glycosylated because the host organism (E. coli in this case) does not glycosylate. The lack of glycolsylation in recombinant nutritive proteins according to this disclosure may result in proteins that are more readily digested. Furthermore, BLG has four disulfide bonds that are known to slow down or interfere with digestion. When these disulfide bonds are disrupted, the rate of digestion increases (Reddy, I. M., Kella, N. K. D. & Kinsella, J. E., 1988. Structural and conformational Basis of the Resistance of b-Lactoglobulin to Peptic and Chymotryptic Digestion. J. Agric. Food Chem., Volume 36, pp. 737-741). A lack or disruption of disulfide bond formation in recombinant nutritive proteins according to this disclosure may result in proteins that are more readily digested.

### Example 8

### Digestibility Screening—Analysis of Digestion Products

[0316] Two nutritive proteins produced as described in Examples 2 and 3 (SEQ ID NOS: 762 and 763) were subjected to SGF and SIF digestion as described in Example 11. Both proteins were completely digested in SGF, and the SGF half lives are shown in Table 8.

TABLE 8

| | Digestion τ_{1/2} (min.) | |
|---|---|---|
| Seq ID No | Simulated Gastric Fluid | Simulated Intestinal Fluid |
| 1055 | 0.7 | n/a |
| 1046 | 6 | n/a |

[0317] To detect and identify peptides that were present after SGF and SIF digestion, samples of the SGF and SIF digests were analyzed by LC/Q-TOF MS/MS. Samples from the SGF digests were directly analyzed by LC/Q-TOF MS/MS, while SIF protein digestions required purification by SCX to remove bile acids before detection and identification by LC/Q-TOF MS/MS. Peptides were extracted from the chromatograms and identified using Bioconfirm Software (Aglient). The sequence assignment of peptides were based on accurate mass match (±10 ppm) and further confirmed by MS/MS fragmentation. The results are shown in Tables 9 and 10 below.

TABLE 9
(SEQ ID NO: 1055)

| SGF Peptides 120 min | SEQ ID NO | SIF Peptides 120 min | SEQ ID NO |
|---|---|---|---|
| LL | | SE | |
| LAL | | PSE | |
| HVL | | HVL | |
| LEL | | FKV | |
| LALA | 1058 | HQI | |
| LLLD | 1059 | PSEA | 1060 |
| IAEF | 1061 | REV | |
| IQQF | 1062 | FDK | |
| YDKL | 1063 | AEFK | 1064 |
| SNLTE | 1065 | LKHV | 1066 |
| ELLEA | 1067 | SSSEL | 1068 |
| EELAL | 1069 | FKVF | 1070 |
| DDLLL | 1071 | AELKH | 1072 |
| LAYDK | 1073 | LKHVL | 1074 |
| TKTRL | 1075 | FKEAF | 1076 |
| DLDHQ | 1077 | NGSISSS | 1078 |
| GTLENL | 1079 | SLGLSPS | 1080 |
| EKLTDA | 1081 | GEKLTD | 1082 |
| AEVDDM | 1083 | ELATVM | 1084 |
| LDDLLL | 1085 | GSGEINI | 1086 |
| LDLDHQ | 1087 | RSLGLSP | 1088 |
| DLKKKL | 1089 | ELKHVL | 1090 |
| KTKTRL | 1091 | KLTDAEV | 1092 |
| SQRLEE | 1093 | FKVFDK | 1094 |
| AEVDDML | 1095 | AEVDDML | 1096 |
| QQELDDL | 1097 | DAEVDDM | 1098 |
| LEKTKTR | 1099 | AELKHVL | 1100 |
| LEKTKTR | 1101 | HVLTSIGE | 1102 |
| GTLENLEE | 1103 | SIGEKLTD | 1104 |
| QQELDDLL | 1105 | RSLGLSPSE | 1106 |
| KLEKTKTRLQ | 1107 | VLTSIGEKL | 1108 |
| SRQLKSNDSEQ | 1109 | TSIGEKLTD | 1110 |
| EKTKTRLQQEL | 1111 | HVLTSIGEK | 1112 |
| YDKLEKTKTRL | 1113 | AELKHVLTS | 1114 |
| LAYDKLEKTKTRL | 1115 | RSLGLSPSEA | 1116 |
| EELKKKLLKDLEL | 1117 | SSNLTEEQIA | 1118 |
| EELKKKLLKDLELL | 1119 | RSLGLSPSEAE | 1120 |
| AELKHVLTSIGEKLTD | 1121 | KVFDKNGDGLISA | 1122 |
| MGSHHHHHHHHSSNL | 1123 | FDKDNNGSISSSEL | 1124 |
| LREVSDGSGEINIQQF | 1125 | REVSDGSGEINIQQ | 1126 |
| AAELKHVLTSIGEKLTD | 1127 | DVDGNHQIEFSEF | 1128 |
| AELKHVLTSIGEKLTDAE | 1129 | LREVSDGSGEINIQQ | 1130 |
| AYDKLEKTKTRLQQEL | 1131 | REVSDGSGEINIQQF | 1132 |
| AAELKHVLTSIGEKLTDAE | 1133 | LREVSDGSGEINIQQFAALLS | 1134 |
| LENLEELKKKLLKDLEL | 1135 | | |
| KLEKTKTRLQQELDDLL | 1136 | | |
| DKLEKTKTRLQQELDDLL | 1137 | | |
| LAYDKLEKTKTRLQQELDDL | 1138 | | |
| LALAYDKLEKTKTRLQQELDDL | 1139 | | |

TABLE 10
(SEQ ID NO: 1046)

| | SEQ | | SEQ |
|---|---|---|---|
| SGF Peptides | ID NO | SIF Peptides 120 min | ID NO |
| GVL | | TKH | |
| ALL | | INDI | 1140 |
| LVL | | HLVL | 1141 |
| IGVL | 1142 | TIKF | 1143 |
| TIKF | 1144 | IGVLD | 1145 |
| TIKF | 1146 | RNLD | 1147 |
| EVYDL | 1148 | IGVLDV | 1149 |
| LNDSVQ | 1150 | QTIKF | 1151 |
| IWVIND | 1152 | VQTIKF | 1153 |
| DLNDSVQ | 1154 | SVQTIKF | 1155 |
| SVQTIKF | 1156 | KCAKCISMIGVL | 1157 |
| HHLVLGALLD | 1158 | EKCAKCISMIGV | 1159 |
| HHHHHHLVL | 1160 | HEFKRTTYSE | 1161 |
| HHHHHHHHLVL | 1162 | SHKFRNLDKDL | 1163 |
| DVTKHEFKRTTY | 1164 | ISMIGVLDVTKHE | 1165 |
| SHHHHHHHHLVL | 1166 | | |
| TKHEFKRTTYSEN | 1167 | | |
| GSHHHHHHHHLVLG | 1168 | | |
| MGSHHHHHHHHLVL | 1169 | | |
| KRTTYSENEVYDLN | 1170 | | |

[0318] As can been seen in Tables 9 and 10, each protein was digested into multiples smaller peptide fragments ranging in size from 2 to 22 amino acids (SEQ ID NO: 486) or 2 to 13 amino acids (SEQ ID NO: 491). None of these peptide fragments was found to be homologous to any known allergen.

[0319] While the present invention has been described with reference to the specific embodiments thereof, it should be understood by those skilled in the art that various changes may be made and equivalents may be substituted without departing from the true spirit and scope of the invention. In addition, many modifications may be made to adapt a particular situation, material, composition of matter, process, process step or steps, to the objective, spirit and scope of the present invention. All such modifications are intended to be within the scope of the claims appended hereto.

1.-111. (canceled)

112. An isolated nutritive protein comprising a first polypeptide comprising a first polypeptide sequence, wherein the first polypeptide sequence is at least 25 amino acids in length, wherein the first polypeptide sequence is at least 90% homologous to a fragment at least 25 amino acids in length of a naturally-occurring protein sequence, wherein the first polypeptide sequence comprises: a. a ratio of branch chain amino acid residues to total amino acid residues of at least 18%; b. a ratio of Leu residues to total amino acid residues of at least 6%; and c. a ratio of essential amino acid residues to total amino acid residues of at least 34%.

113. The isolated nutritive protein of claim 112, wherein the first polypeptide sequence comprises at least one of: a. less than 50 to 90% global homology to a known allergen, b. at least 50 amino acids in length, c. a calculated solvation score of −15, −20, −25, −30 or less, or d. a calculated aggregation score of 0.75, 0.50, or 0.30 or less.

114. The isolated nutritive protein of claim 112, wherein the first polypeptide sequence comprises an amino acid sequence selected from: i. an amino acid sequence selected from SEQ ID NO: 1 to SEQ ID NO: 1052; ii. a modified derivative of an amino acid sequence selected from SEQ ID NO: 1 to SEQ ID NO: 1052; and iii. a mutein of an amino acid sequence selected from SEQ ID NO: 1 to SEQ ID NO: 1052.

115. The isolated nutritive protein of claim 112, wherein the first polypeptide sequence consists of an amino acid sequence selected from: i. an amino acid sequence selected from SEQ ID NO: 1 to SEQ ID NO: 1052, ii. a modified derivative of an amino acid sequence selected from SEQ ID NO: 1 to SEQ ID NO: 1052, and iii. a mutein of an amino acid sequence selected from SEQ ID NO: 1 to SEQ ID NO: 1052.

116. The isolated nutritive protein of claim 112, wherein the first polypeptide sequence is at least 40%, 45%, 50%, 55%, 60%, 65%, 70%, 75%, 80%, 85%, 86%, 87%, 88%, 89%, 90%, 91%, 92%, 93%, 94%, 95%, 96%, 97%, 98%, 99%, or 99.5% homologous to at least one amino acid sequence selected from SEQ ID NO: 1 to SEQ ID NO: 1052.

117. An isolated nutritive protein comprising a first polypeptide comprising a first polypeptide sequence, wherein the first polypeptide sequence is between about 25 and about 100 amino acids in length, wherein the first polypeptide sequence is at least 90% homologous to a fragment at least 25 amino acids in length of a naturally-occurring protein sequence, wherein the first polypeptide sequence comprises: a. a ratio of branch chain amino acid residues to total amino acid residues of at least 8%; and b. a ratio of essential amino acid residues to total amino acid residues of at least 18%.

118. A nutritive composition comprising the isolated nutritive protein of claim 112, comprising at least one isolated nutritive protein, wherein at least one isolated nutritive protein has a simulated gastric digestion half-life of less than 60 minutes, and/or wherein at least one isolated nutritive protein has an aqueous solubility at pH 7 of at least 12.5 g/L, and/or wherein at least one isolated nutritive protein is present in the nutritive composition in an amount of about 0.1 g, 0.1-1 g, 1 g, 2 g, 3 g, 4 g, 5 g, 6 g, 7 g, 8 g, 9 g, 10 g, 15 g, 20 g, 25 g, 30 g, 35 g, 40 g, 45 g, 50 g, 55 g, 60 g, 65 g, 70 g, 75 g, 80 g, 85 g, 90 g, 95 g, and 100 g.

119. A recombinant microorganism comprising a vector comprising a nucleic acid sequence that encodes a nutritive protein according to claim 112, and further comprising an expression control sequence operatively linked to the nucleic acid sequence that encodes the nutritive protein.

120. A pharmaceutical composition comprising the nutritive composition of claim 118 formulated for oral administration to a mammalian subject for maintaining and/or improving muscle function and/or muscle gain, or for reducing lean tissue loss, in subjects at risk of or suffering from muscular deterioration, wherein at least one isolated nutritive proteins are present in the nutritive composition in an amount of at least about 0.1 g, wherein the pharmaceutical composition optionally further comprises at least one component selected from a protein, a polypeptide, a peptide, a free amino acid, a carbohydrate, a lipid, a mineral or mineral source, a vitamin, a supplement, an organism, a pharmaceutical, and an excipient.

121. A method of making a nutritive protein of claim 112, comprising isolating the nutritive protein from a recombinant microorganism.

122. A method of maintaining or increasing at least one of muscle mass, muscle strength, and functional performance in a subject, or of achieving a desirable body mass index in a subject, or for reducing lean tissue loss in a subject, the method comprising providing to the subject a sufficient amount of a nutritive protein of claim 112, wherein the subject is optionally at least one of elderly, critically-medically ill, frail, obese, or suffering from protein-energy malnutrition, cachexia, sarcopenia, osteoporosis, chronic obstructive pulmonary disease, chronic heart failure, HIV, or other disease states.

123. The method of claim 122, wherein the nutritive protein, nutritive composition or pharmaceutical composition is consumed at a rate of from 0.1 g to 1 g a day, 1 g to 5 g a day, from 2 g to 10 g a day, from 5 g to 15 g a day, from 10 g to 20 g a day, from 15 g to 30 g a day, from 20 g to 40 g a day, from 25 g to 50 g a day, from 40 g to 80 g a day, from 50 g to 100 g a day, or more.

124. The method of claim 122, wherein the nutritive protein, nutritive composition or pharmaceutical composition comprises at least about 5% of the total protein intake by the subject over a dietary period, and/or nutritive protein or nutritive composition accounts for at least about 5% of the total calorie intake by the subject over a dietary period.

125. The method of claim 122, wherein the nutritive protein, nutritive composition or pharmaceutical composition is provided in a sufficient amount to induce in an obese subject a satiation response and/or a satiety response in the subject.

The application's sequence listing, which the Patent Office published only in electronic form, follows.

SEQUENCE LISTING (1170 sequences)

SEQ ID NO: 1 - protein, 176 aa, Solanum lycopersicum
AHIGHYDEVWRRRAEEAKEYARNIYEPHPENVTLAFNQKLRDTMKELKKVKGTHNNSTRRGLGTKKYTGPCMVTNPIDKCWRCDPNWADNRKKLADCAMGFGSKAIGGKDGEFYVVTDNSDDYNDPKPGTLRHAVIQKEPLWIIFKRGMNIRLHQEMIMQSDKTIDARGVNVHITK

SEQ ID NO: 2 - protein, 126 aa, Zea mays
LKSSLDLTRYDYYTIGSYDGGKDRYYPDDPAGDYHHRRRYDYGNYYASKTFYDPVERRRVLLGWANESDSVPDDKAKGWAGIHAIPRKIWLDPTGKQLLQWPIHEVEKLRGKAVSVDAKLVKPGDH

SEQ ID NO: 3 - protein, 276 aa, Zea mays
RAAYKTSSDRLERLFGRHGQDKGIIVRATEEQTRELRRHASEGGHGPHWPLPPFGESRGPYSLLDQRPSIANQHGQLYEADARSFHDLAEHDVSVSFANITAGSMSAPLYNTRSFKIAYVPNGKGYAEIVCPHRQSQGGESERERGKGRRSEEEEESSEEQEEVGQGYHTIRARLSPGTAFVVPAGHPFVAVASRDSNLQIVCFEVHADRNEKVFLAGADNVLQKLDRVAKALSFASKAEEVDEVLGSRREKGFLPGPKESGGHEEREQEEEEREE

SEQ ID NO: 4 - protein, 176 aa, Zea mays
TAGSMSAPLYNTRSFKIAYVPNGKGYAEIVCPHRQSQGGESERERGKGRRSEEEEESSEEQEEVGQGYHTIRARLSPGTAFVVPAGHPFVAVASRDSNLQIVCFEVHADRNEKVFLAGADNVLQKLDRVAKALSFASKAEEVDEVLGSRREKGFLPGPKESGGHEEREQEEEEREE

SEQ ID NO: 5 - protein, 226 aa, Zea mays
FSVKHEQKLDCGGGYVKLLGGDVDQKTLGGDTSYSIISRPDISRYSTKKVHTILTKDGKNHLIKKDVPCQTDQLTHVYTFIIRPDATYSILIDNEEKHTGSIYEHWDILPPKKIKDPEAKKPEDWDDKEYIPDPEDKKPEGYDDIPKEIPDPDAKKPEDWDDEEDGEWTAPTIPNPEYKGPWKQKKIKNPNYQGKWKAPMIDNPDFKDDPYIYAFDSLKYIGIELW

SEQ ID NO: 6 - protein, 226 aa, Zea mays
MVSARIVVLLAVLLCAAAAVASSWEDDNHHHHGGHKSGRCVRRCEDRPWHQRPRCLEQCREEEREKRQERSRHEADDRSGEGSSEDEREREQEKEEKQKDRRPYVFDRRSFRRVVRSEQGSLRVLRPFDEVSRLLRGIRDYRVAVLEANPRSFVVPSHTDAHCIGYVAEGEGVVTTIENGERRSYTIKQGHVFVAPAGAVTYLANTDGRKKLVITKILHTISVPGE

SEQ ID NO: 7 - protein, 76 aa, Zea mays
PDNGIMEELRKRAEADRNDKSVKDLVLLLFETALLTSGFSLDDPNTFAARIHRMLKLGLNIDEDAAADEDADMPAL

SEQ ID NO: 8 - protein, 101 aa, Zea mays
DAGAGGDNKTGSGGSATRTYVRDARAMAATPADVKELPGAYAFVVDMPGLGTGDIRVQVEDERVLVVSGERRREEREDDAKYLRMERRMGKFMRKFVLPDN

SEQ ID NO: 9 - protein, 176 aa, Solanum lycopersicum
HTAVEDLELYPNKKSLKEHVEDLKTLISSAITNQETCLDGFSHDEADKKVRKVLLKGQKHVEKMCSNALAMICNMTDTDIANEMKLSAPANNRKLVEDNGEWPEWLSAGDRRLLQSSTVTPDVVVAADGSGDYKTVSEAVRKAPEKSSKRYVIRIKAGVYRENVDVPKKKTNIMFM

SEQ ID NO: 10 - protein, 126 aa, Zea mays
MLVYQDLLSGDELLSDSFTYKELENGVLWEVEGKWVTQGPVDVDIGANPSAEGGEDESVDDTAVKVVDIVDTFRLQEQPPFDKKSFVSYIKKYIKNLTAVLEPEKADEFKKGVEGATKFLLSKLKD

SEQ ID NO: 11 - protein, 251 aa, Zea mays
MAIRKGSSYAVAALLALASVAAVAGEVFFQEKFEDGWESRWVKSEWKKDENMAGEWNHTSGKWNGDAEDKGIQTSEDYRFYAISAEYPEFSNKDKTLVLQFSVKHEQKLDCGGGYVKLLGGDVDQKTLGGDTSYSIISRPDISRYSTKKVHTILTKDGKNHLIKKDVPCQTDQLTHVYTFIIRPDATYSILIDNEEKHTGSIYEHWDILPPKKIKDPEAKKPEDWDDKEYIPDPEDKKPEGYDDIPKEIPD

SEQ ID NO: 12 - protein, 276 aa, Oryza sativa
DLDLSNNRIQDVGDLSPLANLRLVSLDLYECPVTRVKDYRSKVFGMIRTLKYLDKMDADENERPESDDDDDDGDGDGDGEEEEDDDDDEDEDPGSGEVANGGVSHPRGGVASHPVEVNGVIDVDEDESDADEVVPNGGDEHHANGFRVAAVGDEDEYVEEEDDDDEEDYEEEDDLGEEIDEDGDDEDAVVEVHDVPSSSDEEEDGIEEEDEEEDEDEEEVEDDGEEAEPESSGRVALAVGDVGEEIDGHEHGEGEDEDENGEIGEEDEERLEDDRV

SEQ ID NO: 13 - protein, 251 aa, Zea mays
AGVILYILLSGVPPFWAEIEKGIFDAILHEEIDFESQPWPSISESAKDLVRKMLTRDPKKRLTSAQVLQHQWLREGGEASDKPIDSAVLSRMKQFRAMNKLKKMALKVIASNLNEEEIKGLKQMFMNMDTDNSGTITYEELKAGLAKLGSKLSEAEVKQLMEAADVDGNGSIDYVEFITATMHRHKLERDEHLFKAFQYFDKDNSGFITRDELESALIEHEMGDTSTIREIISEVDTDNDGRINYEEFCAM

SEQ ID NO: 14 - protein, 76 aa, Solanum lycopersicum
DVYKAQLKDGSVVAIKKLIHVSGQGDREFTAEMETIGKIKHRNLVPLLGYCKVGEERLLVYEYMKYGSLEDVLHDR

SEQ ID NO: 15 - protein, 76 aa, Solanum lycopersicum
MAEQLTEEQIAEFKEAFSLFDKDGDGCITTKELGTVMRSLGQNPTEAELQDMISEVDADQNGTIDFPEFLNLMARK

SEQ ID NO: 16 - protein, 76 aa, Zea mays
MADQLTDEQIAEFKEAFSLFDKDGDGCITTKELGTVMRSLGQNPTEAELQDMINEVDADGNGTIDFPELLNLMARK

SEQ ID NO: 17 - protein, 276 aa, Zea mays
SLNKARIHICPPVKKPSKLGESLISLAAIVENEHKRLLARKSIIEKRKEELERQILEKEKEEEKKRMSSQKKTVDEERVRLLNEQRQREQDRIRREIEEKNKAEAKKMLEDLNKAGKKHVVVEGELTKEAYMELARNEQLKERHEMEKKLQKFAKTMDYLERAKRQEEAPLIEQAFQKRLEEEKILHEQEQLREIELSKQHHASDLQEKNRLSRMLEHKNALQERIIQERAAEFGRLKKERDERMNRLISSRKHERETVRKLMFYLNLEEQRIEML

SEQ ID NO: 18 - protein, 101 aa, Zea mays
LKKMALKVIASNLNEEEIKGLKQMFMNMDTDNSGTITYEELKAGLAKLGSKLSEAEVKQLMEAADVDGNGSIDYVEFITATMHRHKLERDEHLFKAFQYFD

SEQ ID NO: 19 - protein, 176 aa, Zea mays
NKAEAKKMLEDLNKAGKKHVVVEGELTKEAYMELARNEQLKERHEMEKKLQKFAKTMDYLERAKRQEEAPLIEQAFQKRLEEEKILHEQEQLREIELSKQHHASDLQEKNRLSRMLEHKNALQERIIQERAAEFGRLKKERDERMNRLISSRKHERETVRKLMFYLNLEEQRIEML

SEQ ID NO: 20 - protein, 276 aa, Zea mays
NKAEAKKMLEDLNKAGKKHVVVEGELTKEAYMELARNEQLKERHEMEKKLQKFAKTMDYLERAKRQEEAPLIEQAFQKRLEEEKILHEQEQLREIELSKQHHASDLQEKNRLSRMLEHKNALQERIIQERAAEFGRLKKERDERMNRLISSRKHERETVRKLMFYLNLEEQRIEMLREEEEARKREAEERRKREEAERKAKLDAIAEKQRLREIELEEKAKATREKLLKGSEAVRAPDSAPVAQPPRESAAAAAAAAAAAPAPSKYIPKFKRGGDS

SEQ ID NO: 21 - protein, 76 aa, Zea mays
IVCFEVHADRNEKVFLAGADNVLQKLDRVAKALSFASKAEEVDEVLGSRREKGFLPGPKESGGHEEREQEEEEREE

SEQ ID NO: 22 - protein, 226 aa, Zea mays
MEFWGLEVKPGSTVKCEPGYGFVLHLSQAALGESKKSDNALMYVKIDDQKLAIGTLSVDKNPHIQFDLIFDKEFELSHTSKTTSVFFTGYKVEQPFEEDEMDLDSEDEDEELNVPAVKENGKADEKKQKSQEKAVAAPSKSSPDSKKSKDDDDSDEDETDDSDEDETDDSDEGLSPEEGDDDSSDEDDTSDDEEEDTPTPKKPEVGKKRAAESSVLKTPLSDKKAK

SEQ ID NO: 23 - protein, 176 aa, Solanum lycopersicum
ALARNEKAVSDATIESMKNKLKDKEDAFVSMKKQFESELLSEREDRNKLIRREGEERQALVNQLKSAKTTVISLGQELQNEKKLAEDLKFEIKGLQNDLMNTKEDKKKLQEELKEKLDLIQVLEEKITLLTTEIKDKEVSLRSNTSKLAEKESEVNSLSDMYQQSQDQLMNLTSEI

SEQ ID NO: 24 - protein, 276 aa, Solanum lycopersicum
ALARNEKAVSDATIESMKNKLKDKEDAFVSMKKQFESELLSEREDRNKLIRREGEERQALVNQLKSAKTTVISLGQELQNEKKLAEDLKFEIKGLQNDLMNTKEDKKKLQEELKEKLDLIQVLEEKITLLTTEIKDKEVSLRSNTSKLAEKESEVNSLSDMYQQSQDQLMNLTSEIKELKDEIQKRERELELKCVSEDNLNVQLNSLLLERDESKKELHAIQKEYSEFKSNSDEKVASDATLGEQEKRLHQLEEQLGTALSEASKNEVLIADLTRE

SEQ ID NO: 25 - protein, 126 aa, Zea mays
FSVKHEQKLDCGGGYVKLLGGDVDQKTLGGDTSYSIISRPDISRYSTKKVHTILTKDGKNHLIKKDVPCQTDQLTHVYTFIIRPDATYSILIDNEEKHTGSIYEHWDILPPKKIKDPEAKKPEDWD

SEQ ID NO: 26 - protein, 176 aa, Oryza sativa
QSWTVEWLKFDNSYFKDIKEQRDQDLLVLPTDAALFEDPSFKVYAEKYAEDQEAFFKDYAEAHAKLSDLGAKFDPPEGFSLDDEPAVEEKDPEPAPAPAAAPPPPPVEEKKEAEPTPVPVTVGAAVASSPADDNNGAAPQPEPFVAAKYSYGKKELSDSMKQKIRAEYEGFGGSPD

SEQ ID NO: 27 - protein, 226 aa, Oryza sativa
MADAAAPGEDDAAWERAIAAAVKNAPFSAPKTLTLDGAVKSTTGRLPSPSLLGRYPSLEELSVAGARLSSLAGLPRLPALRRLSLPDNRLSGAASLAAVAESCGATLRHLDLGNNRFADVAELAPLAPHGVESLDLYQCPVTKAKGYRDKVFALIPSLKFLDGMDAEGNDCLDSDDEEDEEEDEGEEGEGEGDEEEEEEGGEEGEGDEDDEEEGDEEEDEEEGEEE

SEQ ID NO: 28 - protein, 251 aa, Zea mays
DQMNTYSFSVDGRYIFDFSMANDQVSHRLLDTFGKKDREILDYLTPDRIVFNGHWNCFYPSILQDNSDLLAKKRRNRLVVPLQYHQEQEKERISCLGISMEIPFMGVLRRNTIFAYFDDPRYRKDKRGSGIVKFRYRTLEEEYRTQEEEYRTREEEYRTREEDSEDEYESPENKYRTREGEGEYKILEDEYRTLEDEYETLEDEYGILEDEYRTLEKDSEEEYGSLENKYRTREGEGEYEILEEESEEEYG

SEQ ID NO: 29 - protein, 201 aa, Zea mays
EIPFMGVLRRNTIFAYFDDPRYRKDKRGSGIVKFRYRTLEEEYRTQEEEYRTREEEYRTREEDSEDEYESPENKYRTREGEGEYKILEDEYRTLEDEYETLEDEYGILEDEYRTLEKDSEEEYGSLENKYRTREGEGEYEILEEESEEEYGSSEDGSEKEYGTLEEDSEEDSEEDSEDEYGSPEEDSILKKEGFIEHRGTK

SEQ ID NO: 30 - protein, 276 aa, Zea mays
LSSASSVPEVKLSQYISALEKLTTLRVLQQASCIFKSIKIDMLSRMIPFFDFSVVEKISVDAAKQNFVAIKVDHLSGVVQFGTVDIESDGLSDHLSVLADSLNKARIHICPPVKKPSKLGESLISLAAIVENEHKRLLARKSIIEKRKEELERQILEKEKEEEKKRMSSQKKTVDEERVRLLNEQRQREQDRIRREIEEKNKAEAKKMLEDLNKAGKKHVVVEGELTKEAYMELARNEQLKERHEMEKKLQKFAKTMDYLERAKRQEEAPLIEQAF

SEQ ID NO: 31 - protein, 176 aa, Zea mays
SLNKARIHICPPVKKPSKLGESLISLAAIVENEHKRLLARKSIIEKRKEELERQILEKEKEEEKKRMSSQKKTVDEERVRLLNEQRQREQDRIRREIEEKNKAEAKKMLEDLNKAGKKHVVVEGELTKEAYMELARNEQLKERHEMEKKLQKFAKTMDYLERAKRQEEAPLIEQAF

SEQ ID NO: 32 - protein, 101 aa, Zea mays
MDARMFGLETPRVAALHHLLDVPDGDKAGGGATRTYVRDARAMAATPADVKELAGAYAFVVDMPGLSTGDIRVQVEDERVLVISGERRREEREDAKYLRME

SEQ ID NO: 33 - protein, 176 aa, Oryza sativa
DLDLSNNRIQDVGDLSPLANLRLVSLDLYECPVTRVKDYRSKVFGMIRTLKYLDKMDADENERPESDDDDDDGDGDGDGEEEEDDDDDEDEDPGSGEVANGGVSHPRGGVASHPVEVNGVIDVDEDESDADEVVPNGGDEHHANGFRVAAVGDEDEYVEEEDDDDEEDYEEEDDLG

SEQ ID NO: 34 - protein, 226 aa, Zea mays
MEFWGLEVKPGSTVKCEPGYGFVLHLSQAALGESKKSDNALMYVKIDDQKLAIGTLSVDKNPHIQFDLIFDKEFELSHTSKTTSVFFTGYKVEQPFEEDEMDLDSEDEDEELNVPVVKENGKADEKKQKSQEKAVAAPSKSSPDSKKSKDDDDSDEDETDDSDEDETDDSDEGLSSEEGDDDSSDEDDTSDDEEEDTPTPKKPEVGKKRPAESSVLKTPLSDKKAK

SEQ ID NO: 35 - protein, 276 aa, Solanum lycopersicum
NTKEDKKKLQEELKEKLDLIQVLEEKITLLTTEIKDKEVSLRSNTSKLAEKESEVNSLSDMYQQSQDQLMNLTSEIKELKDEIQKRERELELKCVSEDNLNVQLNSLLLERDESKKELHAIQKEYSEFKSNSDEKVASDATLGEQEKRLHQLEEQLGTALSEASKNEVLIADLTREKENLRRMVDAELDNVNKLKQEIEVTQESLENSRSEVSDITVQLEQLRDLSSKLEREVSKLQMELEETRASLQRNIDETKHSSELLAAELTTTKELLKKTN

SEQ ID NO: 36 - protein, 176 aa, Solanum lycopersicum
NVQLNSLLLERDESKKELHAIQKEYSEFKSNSDEKVASDATLGEQEKRLHQLEEQLGTALSEASKNEVLIADLTREKENLRRMVDAELDNVNKLKQEIEVTQESLENSRSEVSDITVQLEQLRDLSSKLEREVSKLQMELEETRASLQRNIDETKHSSELLAAELTTTKELLKKTN

SEQ ID NO: 37 - protein, 276 aa, Solanum lycopersicum
NVQLNSLLLERDESKKELHAIQKEYSEFKSNSDEKVASDATLGEQEKRLHQLEEQLGTALSEASKNEVLIADLTREKENLRRMVDAELDNVNKLKQEIEVTQESLENSRSEVSDITVQLEQLRDLSSKLEREVSKLQMELEETRASLQRNIDETKHSSELLAAELTTTKELLKKTNEEMHTMSDELVAVSENRDSLQTELVNVYKKREHTRNELKQEKTIVRTLEEELKFLESQITREKELRKSLEDELEKATESLDEINRNVLALAEELELATSR

SEQ ID NO: 38 - protein, 126 aa, Zea mays
MVSARIVVLLAVLLCAAAAVASSWEDDNHHHHGGHKSGRCVRRCEDRPWHQRPRCLEQCREEEREKRQERSRHEADDRSGEGSSEDEREREQEKEEKQKDRRPYVFDRRSFRRVVRSEQGSLRVLR

SEQ ID NO: 39 - protein, 76 aa, Zea mays
DAGAGGDKAGGGGPTRTYVADARAMAVTPADVKELPGAYAFVVDMPGLGTGDIKVQVEDERVLVISGERRREERED

SEQ ID NO: 40 - protein, 176 aa, Solanum lycopersicum
NKVSAPCSVFVPSMRRPTTRLVARATGDNKDTSVDVHHSSAQGGNNQGTAVERRPTRMALDVSPFGVLDPMSPMRTMRQMIDTMDRLFEDTMTFPGRNRASGTGEIRTPWDIHDDENEIKMRFDMPGLSKEDVKVSVENDMLVIKGEHKKEEDGRDKHSWGRNYSSYDTRLSLPDN

SEQ ID NO: 41 - protein, 76 aa, Solanum lycopersicum
SGTGEIRTPWDIHDDENEIKMRFDMPGLSKEDVKVSVENDMLVIKGEHKKEEDGRDKHSWGRNYSSYDTRLSLPDN

SEQ ID NO: 42 - protein, 176 aa, Solanum lycopersicum
MASPREENVYMAKLAEQAERYEEMVEFMEKVVAAADGAEELTVEERNLLSVAYKNVIGARRASWRIISSIEQKEESRGNEDHVASIKEYRSKIESELTSICNGILKLLDSKLIGSAATGDSKVFYLKMKGDYHRYLAEFKTGAERKEAAENTLSAYKAAQDIANAELAPTHPIRLG

SEQ ID NO: 43 - protein, 176 aa, Zea mays
HHASDLQEKNRLSRMLEHKNALQERIIQERAAEFGRLKKERDERMNRLISSRKHERETVRKLMFYLNLEEQRIEMLREEEEARKREAEERRKREEAERKAKLDAIAEKQRLREIELEEKAKATREKLLKGSEAVRAPDSAPVAQPPRESAAAAAAAAAAAPAPSKYIPKFKRGGDS

SEQ ID NO: 44 - protein, 276 aa, Solanum lycopersicum
FEERLKKLMEEIKQSDEIILFIDEVHTLIGAGAAEGAIDAANILKPALARGELQCIGATTLDEYRKHIEKDPALERRFQPVKVPEPSVDETIQILKGLRERYEIHHKLHYTDEAIEAAAKLSHQYISDRFLPDKAIDLIDEAGSRVRLRHAQLPEEARELEKELRQITKEKNEAVRGQDFEKAGELRDREMDLKAQISALIDKNKEKSKAESEAGDAAGPIVTEADIQHIVSSWTGIPVEKVSTDESDRLLKMEETLHTRVIGQDEAVKAISRAIR

SEQ ID NO: 45 - protein, 176 aa, Solanum lycopersicum
RYEIHHKLHYTDEAIEAAAKLSHQYISDRFLPDKAIDLIDEAGSRVRLRHAQLPEEARELEKELRQITKEKNEAVRGQDFEKAGELRDREMDLKAQISALIDKNKEKSKAESEAGDAAGPIVTEADIQHIVSSWTGIPVEKVSTDESDRLLKMEETLHTRVIGQDEAVKAISRAIR

SEQ ID NO: 46 - protein, 276 aa, Solanum lycopersicum
RYEIHHKLHYTDEAIEAAAKLSHQYISDRFLPDKAIDLIDEAGSRVRLRHAQLPEEARELEKELRQITKEKNEAVRGQDFEKAGELRDREMDLKAQISALIDKNKEKSKAESEAGDAAGPIVTEADIQHIVSSWTGIPVEKVSTDESDRLLKMEETLHTRVIGQDEAVKAISRAIRRARVGLKNPNRPIASFIFSGPTGVGKSELAKSLATYYFGSEEAMIRLDMSEFMERHTVSKLIGSPPGYVGYTEGGQLTEAVRRRPYTVVLFDEIEKAHPD

SEQ ID NO: 47 - protein, 101 aa, Zea mays
PLIRQVVPGGDDNDLELNAESHFLSFVQRFGKSYKDADEHAYRLSVFKDNLRRARRHQLLDPSAEHGVTKFSDLTPAEFRRTYLGLRKSRRALLRELGESA

SEQ ID NO: 48 - protein, 201 aa, Zea mays
LEDEYGILEDEYRTLEKDSEEEYGSLENKYRTREGEGEYEILEEESEEEYGSSEDGSEKEYGTLEEDSEEDSEEDSEDEYGSPEEDSILKKEGFIEHRGTKEFSLKYQKEVDRFFFILQELHILPRSSSLKVLDNSIIGVDTQLTKNTRSRLGGLVRVKRKKSHTELKIFSGDIHFPEEADKILGGSLIPPEREKKDSKES

SEQ ID NO: 49 - protein, 176 aa, Solanum lycopersicum
MEKEREKQVYLARLAEQAERYDEMVEAMKAIAKMDVELTVEERNLVSVGYKNVIGARRASWRILSSIEQKEESKGHEQNVKRIKTYRQRVEDELTKICSDILSVIDEHLVPSSTTGESTVFYYKMKGDYYRYLAEFKAGDDRKEASEQSLKAYEAATATASSDLAPTHPIRLGLAL

SEQ ID NO: 50 - protein, 176 aa, Oryza sativa
ENMVKLKEEFDYKSLCRRLDIELDKLIAENERQRKYFDDEIERITAEAQLRVTEAEREYKISLENEKAKYHQEYLDSIKILEEKWKIHQQSPKKLIKETEPTSSEVGEVQNLLQNEKVLRQSAEDEANDLKNQVLHWKKMEAAATAEVVKLRKMLDTEASQKEKLDEEIAVLKSQL

SEQ ID NO: 51 - protein, 276 aa, Oryza sativa
ENMVKLKEEFDYKSLCRRLDIELDKLIAENERQRKYFDDEIERITAEAQLRVTEAEREYKISLENEKAKYHQEYLDSIKILEEKWKIHQQSPKKLIKETEPTSSEVGEVQNLLQNEKVLRQSAEDEANDLKNQVLHWKKMEAAATAEVVKLRKMLDTEASQKEKLDEEIAVLKSQLLQLSLDADETRRSLDRGDGSGKIFPGFDSLMSHSRNSQPREQSNGPKPPIAKLFEQVGLQKILSLLESEEPDVRVHAVKVVANLAAEEANQEKIVEAGGL

SEQ ID NO: 52 - protein, 76 aa, Solanum lycopersicum
FEERLKKLMEEIKQSDEIILFIDEVHTLIGAGAAEGAIDAANILKPALARGELQCIGATTLDEYRKHIEKDPALER

SEQ ID NO: 53 - protein, 76 aa, Solanum lycopersicum
ERLKKLMEEIKQSDEIILFIDEVHTLIGAGAAEGAIDAANILKPALARGELQCIGATTLDEYRKHIEKDPALERRF

SEQ ID NO: 54 - protein, 176 aa, Solanum lycopersicum
FEERLKKLMEEIKQSDEIILFIDEVHTLIGAGAAEGAIDAANILKPALARGELQCIGATTLDEYRKHIEKDPALERRFQPVKVPEPSVDETIQILKGLRERYEIHHKLHYTDEAIEAAAKLSHQYISDRFLPDKAIDLIDEAGSRVRLRHAQLPEEARELEKELRQITKEKNEAVR

SEQ ID NO: 55 - protein, 176 aa, Solanum lycopersicum
ERLKKLMEEIKQSDEIILFIDEVHTLIGAGAAEGAIDAANILKPALARGELQCIGATTLDEYRKHIEKDPALERRFQPVKVPEPTVDETIQILKGLRERYEIHHKLRYTDEDLVAAAQLSYQYISDRFLPDKAIDLIDEAGSRVRLRHAQLPEEAKELEKELRQITKEKNEAVRGQ

SEQ ID NO: 56 - protein, 276 aa, Solanum lycopersicum
GLKMPTLEEYGTNLTKLAEEGKLDPVVGRQAQIERVTQILGRRTKNNPCLIGEPGVGKTAIAEGLAQRIANGDVPETIEGKKVITLDMGLLVAGTKYRGEFEERLKKLMEEIKQSDEIILFIDEVHTLIGAGAAEGAIDAANILKPALARGELQCIGATTLDEYRKHIEKDPALERRFQPVKVPEPSVDETIQILKGLRERYEIHHKLHYTDEAIEAAAKLSHQYISDRFLPDKAIDLIDEAGSRVRLRHAQLPEEARELEKELRQITKEKNEAVR

SEQ ID NO: 57 - protein, 276 aa, Solanum lycopersicum
KMPTLEEYGTNLTKLAEEGKLDPVVGRQPQIERVTQILGRRTKNNPCLIGEPGVGKTAIAEGLAQRIANGDVPETIEGKKVITLDMGLLVAGTKYRGEFEERLKKLMEEIKQSDEIILFIDEVHTLIGAGAAEGAIDAANILKPALARGELQCIGATTLDEYRKHIEKDPALERRFQPVKVPEPTVDETIQILKGLRERYEIHHKLRYTDEDLVAAAQLSYQYISDRFLPDKAIDLIDEAGSRVRLRHAQLPEEAKELEKELRQITKEKNEAVRGQ

SEQ ID NO: 58 - protein, 76 aa, Solanum lycopersicum
RYEIHHKLHYTDEAIEAAAKLSHQYISDRFLPDKAIDLIDEAGSRVRLRHAQLPEEARELEKELRQITKEKNEAVR

SEQ ID NO: 59 - protein, 201 aa, Solanum lycopersicum
GKSELAKSLATYYFGSEEAMIRLDMSEFMERHTVSKLIGSPPGYVGYTEGGQLTEAVRRRPYTVVLFDEIEKAHPDVFNMMLQILEDGRLTDSKGRTVDFKNTLLIMTSNVGSSVIEKGGRRIGFDLDFDEKDSSYNRIKSLVTEELKQYFRPEFLNRLSEMIVFRQLTKLEVKEIADIMLKEVFVRLKNKEIELQVTERF

SEQ ID NO: 60 - protein, 201 aa, Solanum lycopersicum
ELAKALAAYYFGSEEAMIRLDMSEFMERHTVSKLIGSPPGYVGYTEGGQLTEAVRRRPYTVVLFDEIEKAHPDVFNMMLQILEDGRLTDSKGRTVDFKNTLLIMTSNVGSSVIEKGGRRIGFDLDLDEKDSSYNRIKSLVTEELKQYFRPEFLNRLDEMIVFRQLTKLEVKEIADIMLKEVFERLKVKEIELQVTERFRDR

SEQ ID NO: 61 - protein, 76 aa, Solanum lycopersicum
EIHHKLRYTDEDLVAAAQLSYQYISDRFLPDKAIDLIDEAGSRVRLRHAQLPEEAKELEKELRQITKEKNEAVRGQ

SEQ ID NO: 62 - protein, 276 aa, Solanum lycopersicum
EIHHKLRYTDEDLVAAAQLSYQYISDRFLPDKAIDLIDEAGSRVRLRHAQLPEEAKELEKELRQITKEKNEAVRGQDFEKAGELRDREMDLKAQITALIDKNKEVSKAESEAADTGPLVTEADIQHIVSSWTGIPVEKVSTDESDRLLKMEETLHTRIIGQDEAVKAISRAIRRARVGLKNPNRPIASFIFSGPTGVGKSELAKALAAYYFGSEEAMIRLDMSEFMERHTVSKLIGSPPGYVGYTEGGQLTEAVRRRPYTVVLFDEIEKAHPDVFN

SEQ ID NO: 63 - protein, 276 aa, Solanum lycopersicum
ERLKKLMEEIKQSDEIILFIDEVHTLIGAGAAEGAIDAANILKPALARGELQCIGATTLDEYRKHIEKDPALERRFQPVKVPEPTVDETIQILKGLRERYEIHHKLRYTDEDLVAAAQLSYQYISDRFLPDKAIDLIDEAGSRVRLRHAQLPEEAKELEKELRQITKEKNEAVRGQDFEKAGELRDREMDLKAQITALIDKNKEVSKAESEAADTGPLVTEADIQHIVSSWTGIPVEKVSTDESDRLLKMEETLHTRIIGQDEAVKAISRAIRRAR

SEQ ID NO: 64 - protein, 76 aa, Solanum lycopersicum
LLIMTSNVGSSVIEKGGRRIGFDLDLDEKDSSYNRIKSLVTEELKQYFRPEFLNRLDEMIVFRQLTKLEVKEIADI

SEQ ID NO: 65 - protein, 76 aa, Solanum lycopersicum
KNTLLIMTSNVGSSVIEKGGRRIGFDLDFDEKDSSYNRIKSLVTEELKQYFRPEFLNRLSEMIVFRQLTKLEVKEI

SEQ ID NO: 66 - protein, 176 aa, Solanum lycopersicum
EIHHKLRYTDEDLVAAAQLSYQYISDRFLPDKAIDLIDEAGSRVRLRHAQLPEEAKELEKELRQITKEKNEAVRGQDFEKAGELRDREMDLKAQITALIDKNKEVSKAESEAADTGPLVTEADIQHIVSSWTGIPVEKVSTDESDRLLKMEETLHTRIIGQDEAVKAISRAIRRAR

SEQ ID NO: 67 - protein, 76 aa, Solanum lycopersicum
KNKEVSKAESEAADTGPLVTEADIQHIVSSWTGIPVEKVSTDESDRLLKMEETLHTRIIGQDEAVKAISRAIRRAR

SEQ ID NO: 68 - protein, 76 aa, Solanum lycopersicum
IDKNKEKSKAESEAGDAAGPIVTEADIQHIVSSWTGIPVEKVSTDESDRLLKMEETLHTRVIGQDEAVKAISRAIR

SEQ ID NO: 69 - protein, 176 aa, Solanum lycopersicum
KNTLLIMTSNVGSSVIEKGGRRIGFDLDFDEKDSSYNRIKSLVTEELKQYFRPEFLNRLSEMIVFRQLTKLEVKEIADIMLKEVFVRLKNKEIELQVTERFRDRVVDEGYNPSYGARPLRRAIMRLLEDSMAEKMLAGEIKEGDSVIVDVDSDGNVTVLNGTSGAPSDSAPEPILV

SEQ ID NO: 70 - protein, 76 aa, Zea mays
MDLDSEDEEEELNIPVIKENGKADGKEEQKNQEKAVAATASKSSLGLEKKSKDDSDDSDEDESDDSDEDDSDDSDE

SEQ ID NO: 71 - protein, 76 aa, Zea mays
MDLDSEDEDEELNVPVVKENGKADEKKQKSQEKAVAAPSKSSPDSKKSKDDDDSDEDETDDSDEDETDDSDEGLSS

SEQ ID NO: 72 - protein, 101 aa, Zea mays
LEDEYGILEDEYRTLEKDSEEEYGSLENKYRTREGEGEYEILEEESEEEYGSSEDGSEKEYGTLEEDSEEDSEEDSEDEYGSPEEDSILKKEGFIEHRGTK

SEQ ID NO: 73 - protein, 76 aa, Zea mays
EERSKARRFDVDSGTMKDRQLRKEYVQKFIDCQVKDVAEFEVERDELIKVHEDKKLKLKKEYMDLELELEKEFDAA

SEQ ID NO: 74 - protein, 76 aa, Solanum lycopersicum
VEDHRVRAEKVAKFIKLQDKEMEEFVEERENLMRTHDDRIAALRRKYWEEEVELERKFDLELSKLMEKYSPKQSDE

SEQ ID NO: 75 - protein, 101 aa, Zea mays
EIPFMGVLRRNTIFAYFDDPRYRKDKRGSGIVKFRYRTLEEEYRTQEEEYRTREEEYRTREEDSEDEYESPENKYRTREGEGEYKILEDEYRTLEDEYETL

SEQ ID NO: 76 - protein, 76 aa, Oryza sativa
ENMVKLKEEFDYKSLCRRLDIELDKLIAENERQRKYFDDEIERITAEAQLRVTEAEREYKISLENEKAKYHQEYLD

SEQ ID NO: 77 - protein, 76 aa, Zea mays
FLTCSDDSEPLIDKKVDDLRLPSEDSEDDDYDPAGPDSDKDVEKKSSSDESDFTSDSDDFCKEISKSGHDEVSSPL

SEQ ID NO: 78 - protein, 76 aa, Oryza sativa
ESNGNEEKADASGVDKYPLVSVPDETLTPEQLKEKKKQILLKTTTEGRMRAKQRRAEEEALREKQEEERRLENPEL

SEQ ID NO: 79 - protein, 176 aa, Zea mays
MDLDSEDEEEELNIPVIKENGKADGKEEQKNQEKAVAATASKSSLGLEKKSKDDSDDSDEDESDDSDEDDSDDSDEGEGLSPDEGDDDSSDEDDTSDDDEEETPTPKKPEAGKKRGAENALKTPLSDKKAKVATPPAQKTGGKKGATHVATPHPAKGKTPANNDKLTEKSPKSGGS

SEQ ID NO: 80 - protein, 76 aa, Zea mays
KKKQLELEGIQRISARRKEQEQVRREATEDLAEDLSEGEKGDTIGELAPVETTKKKFQRNFSDLTVWSDDNKEKKL

SEQ ID NO: 81 - protein, 176 aa, Zea mays
EMVVIQMKQMSEDNQQLNYLKNKMVKTEQRSKAVEESLGVVTQKLRETIEENIFVRSKAKEKHMEYEEEMKSQEEIFHGLIEDIHKATEDKEKQFEKLLQEERSKARRFDVDSGTMKDRQLRKEYVQKFIDCQVKDVAEFEVERDELIKVHEDKKLKLKKEYMDLELELEKEFDAA

SEQ ID NO: 82 - protein, 76 aa, Solanum lycopersicum
VNVYKKREHTRNELKQEKTIVRTLEEELKFLESQITREKELRKSLEDELEKATESLDEINRNVLALAEELELATSR

SEQ ID NO: 83 - protein, 176 aa, Oryza sativa
ESNGNEEKADASGVDKYPLVSVPDETLTPEQLKEKKKQILLKTTTEGRMRAKQRRAEEEALREKQEEERRLENPELYLEELRARYSELSDRVDQRKRQKLNGGKTNGNHNSSGGVGRGERLNAAQKERMRLLTSAAFDRGKGEDTFGTRDEDWLVYKKMSKDNDDDDDGNDDDESE

SEQ ID NO: 84 - protein, 76 aa, Solanum lycopersicum
MKEGKRKSSRLQSEAAGAGSSRKLDLDGVAAERQERNGYPEDAGSKCEEEPVAGEGEGEGEEKDEAPEVVRVEKGD

SEQ ID NO: 85 - protein, 76 aa, Zea mays
SLNKARIHICPPVKKPSKLGESLISLAAIVENEHKRLLARKSIIEKRKEELERQILEKEKEEEKKRMSSQKKTVDE

SEQ ID NO: 86 - protein, 76 aa, Zea mays
KVALRREKKPREPTRAETELETHELRRLRRLARGIGRWARAKKAGVTDEVVKEVRREWASGEELAAVRIVEPLRRS

SEQ ID NO: 87 - protein, 76 aa, Zea mays
NKAEAKKMLEDLNKAGKKHVVVEGELTKEAYMELARNEQLKERHEMEKKLQKFAKTMDYLERAKRQEEAPLIEQAF

SEQ ID NO: 88 - protein, 176 aa, Solanum lycopersicum
QLIWFKNKAAKHQMQAKALEESLSLVSEKHRQTLEENKIVRLKTKMHHEQIKEEMEFQEQFFKDQIKIIHDARTAREDNFEKTQQEQREMVKQSNANTASVEDHRVRAEKVAKFIKLQDKEMEEFVEERENLMRTHDDRIAALRRKYWEEEVELERKFDLELSKLMEKYSPKQSDE

SEQ ID NO: 89 - protein, 76 aa, Solanum lycopersicum
MKRDRDRDREREKRAFSNGAVSSGKSKIWEEDEEEKPDAGMDELLAVLGYKVKSSDMADVAQKLEQLEMAMGTTME

SEQ ID NO: 90 - protein, 176 aa, Zea mays
IPMGDEGWLCPACDCKIDCIDLINELHGSNISIEDSWEKVFPDAAAMANDSKQDDAFDLPSDDSDDNDFDPNMPEEHVVGKDEESSEEDEDGGSDSDDSDFLTCSDDSEPLIDKKVDDLRLPSEDSEDDDYDPAGPDSDKDVEKKSSSDESDFTSDSDDFCKEISKSGHDEVSSPL

SEQ ID NO: 91 - protein, 76 aa, Zea mays
HHASDLQEKNRLSRMLEHKNALQERIIQERAAEFGRLKKERDERMNRLISSRKHERETVRKLMFYLNLEEQRIEML

SEQ ID NO: 92 - protein, 76 aa, Solanum lycopersicum
MEEEKHHHHHLFHHKDKAEEGPVDYEKEIKHHKHLEQIGKLGTVAAGAYALHEKHEAKKDPEHAHKHKIEEEIAAA

SEQ ID NO: 93 - protein, 76 aa, Oryza sativa
MATREHELRPEQERLGEDREEYEDGEEEEEEGEEGWDDWESDGDDAGGGGGGGGLLCLFCSARFDSESSLFSHCAS

SEQ ID NO: 94 - protein, 76 aa, Oryza sativa
DLDLSNNRIQDVGDLSPLANLRLVSLDLYECPVTRVKDYRSKVFGMIRTLKYLDKMDADENERPESDDDDDDGDGD

SEQ ID NO: 95 - protein, 226 aa, Zea mays
MEFWGLEVKPGSTVKCEPGHGFILHVSQAALGESKKSDSALMYVKVDDKKLAIGTLSIDKYPQIQFDLVFNKEFELSHTSKTTSVFFSGYKVEQPIEGDEMDLDSEDEEEELNIPVIKENGKADGKEEQKNQEKAVAATASKSSLGLEKKSKDDSDDSDEDESDDSDEDDSDDSDEGEGLSPDEGDDDSSDEDDTSDDDEEETPTPKKPEAGKKRGAENALKTPLS

SEQ ID NO: 96 - protein, 76 aa, Solanum lycopersicum
MAEEKHQHHHHLFHHKNKEDEGGPVDYEKEVKHHSHLEKIGELGAVAAGALALHEKHKAKKDPEHAHKHKIEEEIM

SEQ ID NO: 97 - protein, 76 aa, Solanum lycopersicum
MSLRPNSRTEARRSRYKVAVDAEEGRRRREDNMVEIRKNKREENLLKKRREGLLQAQQFPSTAAVSHLDKKLETLP

SEQ ID NO: 98 - protein, 76 aa, Oryza sativa
MENQFQDGKEEVIEAWYMDDSEEDQRLPHHREPKEFIPLSKLSELGILSWRLNADDWENDENLKKIREARGYSYMD

SEQ ID NO: 99 - protein, 76 aa, Zea mays
DLLDNRKQRILSTIRNSEELRKGTLEQLEKARIRLQKVELEADEYRMNGYSEIEREKENLINATSISLEQLEKSKN

SEQ ID NO: 100 - protein, 76 aa, Zea mays
RKHKISKHGPRYREHSPGKRQKVFTSDISFEGNIMNKLSIPEIRDTRLESRESGGDKLRILDESTKKTSRKDMCGE

SEQ ID NO: 101 - protein, 176 aa, Solanum lycopersicum
NTKEDKKKLQEELKEKLDLIQVLEEKITLLTTEIKDKEVSLRSNTSKLAEKESEVNSLSDMYQQSQDQLMNLTSEIKELKDEIQKRERELELKCVSEDNLNVQLNSLLLERDESKKELHAIQKEYSEFKSNSDEKVASDATLGEQEKRLHQLEEQLGTALSEASKNEVLIADLTRE

SEQ ID NO: 102 - protein, 101 aa, Oryza sativa
ESCGATLRHLDLGNNRFADVAELAPLAPHGVESLDLYQCPVTKAKGYRDKVFALIPSLKFLDGMDAEGNDCLDSDDEEDEEEDEGEEGEGEGDEEEEEEGG

SEQ ID NO: 103 - protein, 76 aa, Oryza sativa
CELEKQLSRTTEEFASQISSLEERIADLISEKELVYEELKSTQEKMQQEMRHRQGLEDEILRLKQSLADNCSEESK

SEQ ID NO: 104 - protein, 76 aa, Zea mays
SSRDPSPSDEDMDGEVEILGFKMPTEERVRKKESNRESARRSRYRKAAHLKELEDQVAQLKAENSCLLRRIAALNQ

SEQ ID NO: 105 - protein, 76 aa, Solanum lycopersicum
MSPKPSENGIDGDDERDEEEEDSEEEEAEEEEEDEPRLKYQRMGASVPSLLSADAATCIAVAERMIALGTHGGAVH

SEQ ID NO: 106 - protein, 176 aa, Zea mays
FLTCSDDSEPLIDKKVDDLRLPSEDSEDDDYDPAGPDSDKDVEKKSSSDESDFTSDSDDFCKEISKSGHDEVSSPLLPDAKVGDMEKITAQAKTTSSADDPMETEIDQGVVLPDSRRRQAERLDYKKLYDEAYGEASSDSSDDEEWSGKNTPIIKSNEEGEANSPAGKGSRVVHHN

SEQ ID NO: 107 - protein, 276 aa, Oryza sativa
QLPWVPPPVEEPPSEEELARKAALKEKAGQRLRDMAAAKRSQKIAELEKQLSYLEELMEQLDGAEEEEATAILGRSGYLSQQEIKSAILKATQSLRKAKGESNGNEEKADASGVDKYPLVSVPDETLTPEQLKEKKKQILLKTTTEGRMRAKQRRAEEEALREKQEEERRLENPELYLEELRARYSELSDRVDQRKRQKLNGGKTNGNHNSSGGVGRGERLNAAQKERMRLLTSAAFDRGKGEDTFGTRDEDWLVYKKMSKDNDDDDDGNDDDESE

SEQ ID NO: 108 - protein, 76 aa, Zea mays
EISKLQQSIAKAIEEKISGDQRRYLLNEQLKAIKKELGLETDDKTALSAKFRERIESKKDKCPPHVLQVIEEELTK

SEQ ID NO: 109 - protein, 276 aa, Zea mays
IPMGDEGWLCPACDCKIDCIDLINELHGSNISIEDSWEKVFPDAAAMANDSKQDDAFDLPSDDSDDNDFDPNMPEEHVVGKDEESSEEDEDGGSDSDDSDFLTCSDDSEPLIDKKVDDLRLPSEDSEDDDYDPAGPDSDKDVEKKSSSDESDFTSDSDDFCKEISKSGHDEVSSPLLPDAKVGDMEKITAQAKTTSSADDPMETEIDQGVVLPDSRRRQAERLDYKKLYDEAYGEASSDSSDDEEWSGKNTPIIKSNEEGEANSPAGKGSRVVHHN

SEQ ID NO: 110 - protein, 76 aa, Zea mays
LLFIVLDQMDPEIDRQISEHVARMHRYCTDDGGARSLDKEGYAEEDDGDANAAIFVKYDRMLHGQDRRRGKKSKQD

SEQ ID NO: 111 - protein, 76 aa, Zea mays; identical to SEQ ID NO: 110

SEQ ID NO: 112 - protein, 76 aa, Zea mays; identical to SEQ ID NO: 110

SEQ ID NO: 113 - protein, 176 aa, Solanum lycopersicum
TQESLENSRSEVSDITVQLEQLRDLSSKLEREVSKLQMELEETRASLQRNIDETKHSSELLAAELTTTKELLKKTNEEMHTMSDELVAVSENRDSLQTELVNVYKKREHTRNELKQEKTIVRTLEEELKFLESQITREKELRKSLEDELEKATESLDEINRNVLALAEELELATSR

SEQ ID NO: 114 - protein, 276 aa, Zea mays
KNQSLDKIRPEKELERAKSEILRCKLRIREVFRNIDSLLSKGKIDETLFDSEGEISCEDIFCSTCGSNDATLGNDIILCDGACDRGFHQNCLNPPLRTEDIPMGDEGWLCPACDCKIDCIDLINELHGSNISIEDSWEKVFPDAAAMANDSKQDDAFDLPSDDSDDNDFDPNMPEEHVVGKDEESSEEDEDGGSDSDDSDFLTCSDDSEPLIDKKVDDLRLPSEDSEDDDYDPAGPDSDKDVEKKSSSDESDFTSDSDDFCKEISKSGHDEVSSPL

SEQ ID NO: 115 - protein, 76 aa, Oryza sativa
MENEFQDGKTEVIEAWYMDDSEEDQRLPHHREPKEFIHVDKLTELGVISWRLNPDNWENCENLKRIREARGYSYVD

SEQ ID NO: 116 - protein, 76 aa, Zea mays
HENTENSNTMIELEAEKYRLEKELKDHEWKLSVLNKKIERSNQALAKLHSSWSPSEQSADREHLTEEEKIMFRRIG

SEQ ID NO: 117 - protein, 76 aa, Zea mays
IDNPDFKDDPYIYAFDSLKYIGIELWQVKSGTLFDNIIITDDPALAKTFAEETWGKHKEAEKAAFDEAEKKKEEED

SEQ ID NO: 118 - protein, 76 aa, Oryza sativa
ESTIKRLMLDLEKEKGKNNILSEQIIHLETSLDENKQKQLENISNTNILADTTKSHEKKIRELLKQLEDERSRSAS

SEQ ID NO: 119 - protein, 101 aa, Zea mays
CYETGVALGQEPEDKMPVNEYYEYFGPDYTLHVAPSNMENKNTRQQLDDIRSKLSKLRHAPSVHFQERVPDTEIPEQDEDQDDPDERHDPDSDMEVDDHKA

SEQ ID NO: 120 - protein, 276 aa, Zea mays
YFGEYEASKARHAYGPSGHRGMSVLIFESSAVGYMEAERLHKHFVNQGTDRNSWHLRKVRFVPGGKRQLYGFLANKEDMEAFNKHCHGKSRLKYEMRSYNEMVVIQMKQMSEDNQQLNYLKNKMVKTEQRSKAVEESLGVVTQKLRETIEENIFVRSKAKEKHMEYEEEMKSQEEIFHGLIEDIHKATEDKEKQFEKLLQEERSKARRFDVDSGTMKDRQLRKEYVQKFIDCQVKDVAEFEVERDELIKVHEDKKLKLKKEYMDLELELEKEFDAA

SEQ ID NO: 121 - protein, 76 aa, Solanum lycopersicum
NTKEDKKKLQEELKEKLDLIQVLEEKITLLTTEIKDKEVSLRSNTSKLAEKESEVNSLSDMYQQSQDQLMNLTSEI

SEQ ID NO: 122 - protein, 76 aa, Zea mays
EMVVIQMKQMSEDNQQLNYLKNKMVKTEQRSKAVEESLGVVTQKLRETIEENIFVRSKAKEKHMEYEEEMKSQEEI

SEQ ID NO: 123 - protein, 76 aa, Oryza sativa
MSFIRKKSMEFLKSFEVPAKNPSEEAQRRWRDAVGTLVKNRRRRFRMVPDLDKRSQAETQRRKIQEKLRVALFVQK

SEQ ID NO: 124 - protein, 76 aa, Zea mays
DDKELKKQLLRKYSGCLGNLRKELCKKRKKDKLPKEARQKLLSWWELHYRWPYPSEMEKIALAESTGLEQKQINNW

SEQ ID NO: 125 - protein, 76 aa, Solanum lycopersicum
ALARNEKAVSDATIESMKNKLKDKEDAFVSMKKQFESELLSEREDRNKLIRREGEERQALVNQLKSAKTTVISLGQ

SEQ ID NO: 126 - protein, 176 aa, Zea mays
CYGCGNPETEILISKTQMISLKCAACGFVSDVDMRDKLTTFILKNPPEQKKGGKDKKAMRRAEKERLKEGEAADEEQKKLKKDAKKKGSKDSTAKGLKKKATTATGSDEDHSSSPTRSHDGDKAAADDDDDDVQWQTDTSIEAAKQRMQEQLSAATAEMVMLSTEETEKKMKQPTH

SEQ ID NO: 127 - protein, 176 aa, Oryza sativa
QLPWVPPPVEEPPSEEELARKAALKEKAGQRLRDMAAAKRSQKIAELEKQLSYLEELMEQLDGAEEEEATAILGRSGYLSQQEIKSAILKATQSLRKAKGESNGNEEKADASGVDKYPLVSVPDETLTPEQLKEKKKQILLKTTTEGRMRAKQRRAEEEALREKQEEERRLENPEL

SEQ ID NO: 128 - protein, 76 aa, Zea mays
SNLAGSEDQEDADTLDKDEFVVQKLIGIRYDGTGRKKGVYFKVQWEEYGPEEDTWEPIDNLSDCPLKIREFVQEGR

SEQ ID NO: 129 - protein, 76 aa, Solanum lycopersicum
DLLDNRKQRILNTIRNSEELRGGAIEQLEKARSRLRKVETEAEQFRVNGYSEIEREKLNLINSTYKTLEQLENYKN

SEQ ID NO: 130 - protein, 76 aa, Zea mays
PEPEEEKHFFTEGEDQLIWRATQEHGLNREVVNVLCQFIDSTPSEIEERSEVLFEKNEKNSGSSDKIERQLSLDKT

SEQ ID NO: 131 - protein, 76 aa, Solanum lycopersicum
MAEEKQHHRLFHHKNREEEGGPVDHKKKVKHHSHLQKIGELGAVAAGAYALHEKHKAKKDPENAHKHKIKQEIAAV

SEQ ID NO: 132 - protein, 76 aa, Zea mays
FKHSEDHIIRMTVQECGMSDAVLQTLARHMERAADDIKARYEILHGEKTKDSCKKGTEHNVKVEDLYCDKDLDAAL

SEQ ID NO: 133 - protein, 101 aa, Solanum lycopersicum
KDAEEEVALISYSQQSDFRRGIITGSMRAQRRKTFISKLFQANVHSPLFVDRITPLRLFSFDISELIKPILKNWTDKEGEFKILESREEQTKREEKKEKDK

SEQ ID NO: 134 - protein, 76 aa, Zea mays
VRQELKLELKQGFKSRIEDVREEILRKRRAGKLPGDTTSILKQWWQEHSKWPYPTEDDKAKLVEETGLQLKQINNW

SEQ ID NO: 135 - protein, 76 aa, Zea mays
EQAKSQVEALEDALDVEDLEADKRPEDLMLSFVSGEKGKDRSDKEVVTPWFKFLWETYRTVLEILRNNSKLEALYA

SEQ ID NO: 136 - protein, 76 aa, Zea mays
MKKKGGRKIFGFMVKEEKEENRGSVEFQVFSFTNKIRRLASHLELHKKDFSSERGLRRLLGKRQRLLAYLAKKNRV

SEQ ID NO: 137 - protein, 76 aa, Zea mays
KNQSLDKIRPEKELERAKSEILRCKLRIREVFRNIDSLLSKGKIDETLFDSEGEISCEDIFCSTCGSNDATLGNDI

SEQ ID NO: 138 - protein, 76 aa, Oryza sativa
IGPSSRHFSETSSTIMFGQRAMKIVNTIRIKEEVDYESLYKKVEHEVDHLTSEMERQQKLKNSEKMQLEKKLKESE

SEQ ID NO: 139 - protein, 76 aa, Solanum lycopersicum
MEKEREKQVYLARLAEQAERYDEMVEAMKAIAKMDVELTVEERNLVSVGYKNVIGARRASWRILSSIEQKEESKGH

SEQ ID NO: 140 - protein, 76 aa, Zea mays
KLEQLLKQGRMSKEEIDSTYKIMRRIEGEELALDASELVITSTRQEIDEQWGLYDGFDVKLEKVLRARARRGVSCH

SEQ ID NO: 141 - protein, 76 aa, Zea mays
EISFEEQLSMLDSVHLKVRLSKATELVDRHLQSILVAEKITQKVEGQLSKSQKEFLLRQQMRAIKEELGDNDDDED

SEQ ID NO: 142 - protein, 176 aa, Solanum lycopersicum
MKEGKRKSSRLQSEAAGAGSSRKLDLDGVAAERQERNGYPEDAGSKCEEEPVAGEGEGEGEEKDEAPEVVRVEKGDGDGVAKKVKPKLAEGFYEIETVRRRRTVKGKVYYLIKWRGWPESANTWEPETNLSSCTDIIDAYEESLKSGKLRRRKRKFGATQTHPMIKQQRRFSAPVA

SEQ ID NO: 143 - protein, 76 aa, Solanum lycopersicum
MAERVLTRVHRLRERVDATLCAHRNEILLFLSRIESHGKGILKPHELLAEFDAIRQDDKDKLNEHAFEELLKSTQE

SEQ ID NO: 144 - protein, 101 aa, Solanum lycopersicum
MAPKAGKKPAEKKPVEEKKAEEVPAEKKPKAGKKLPKDAGADKKKKKSKKSVETYKIYIFKVLKQVHPDIGISSKSMGIMNSFINDIFEKLAQESSRLARI

SEQ ID NO: 145 - protein, 76 aa, Oryza sativa
MGSQVNDVEEVVQAWYMDDDDNAEEDQRLPHRRQPDDLLPLAKLLDLGLVAMRLDADNHEHDENLKIMREQRGYLH

SEQ ID NO: 146 - protein, 76 aa, Solanum lycopersicum
VPFITVFLNKFLDNKSKGFLLDEIDIDDSDDIDDSDNLDASDDIDRDLDTELELLTRMNGLTVDMMPEIDRFYITL

SEQ ID NO: 147 - protein, 76 aa, Zea mays
MKERQRWRPEEDAVLRAYVRQYGPREWHLVSQRMNVALDRDAKSCLERWKNYLRPGIKKGSLTEEEQRLVIRLQAK

SEQ ID NO: 148 - protein, 76 aa, Zea mays
RYSKRDDATKDLTEAVEVGDKDAIEKLSKRTVKVTRQHNEDCKRLLRLMGVPVVEAPSEAEAECAALCINDKVFAV

SEQ ID NO: 149 - protein, 76 aa, Solanum lycopersicum
MDSSVSTEPLSKNALKREKKAKEKEQLEQEKKAAAVAKRQMEQHNLPENDDLDPTQYLANRLRNIESLRESGINPY

SEQ ID NO: 150 - protein, 76 aa, Oryza sativa
MEKLDRYLQEHFDVPAKNPSEEAQRRWRQAVGTIVKNRRRRFRWVPDLDRRSLDKAKVRSTQEKIRVALYVQQAAL

SEQ ID NO: 151 - protein, 76 aa, Solanum lycopersicum
RLEVLQRNQKHYVGEDLESLSMKELQNLEHQLDSALKHIRSRKNQLMHESISVLQKKDRALQEQNNQLSKKVKERE

SEQ ID NO: 152 - protein, 76 aa, Zea mays
CYGCGNPETEILISKTQMISLKCAACGFVSDVDMRDKLTTFILKNPPEQKKGGKDKKAMRRAEKERLKEGEAADEE

SEQ ID NO: 153 - protein, 76 aa, Oryza sativa
MEKLDRYLQENFDVPAKNPSEEAQRRWRQAVGTIVKNRRRRFRWVPDLERRSLDKAKVRSTQEKIRVALYVQQAAL

SEQ ID NO: 154 - protein, 76 aa, Zea mays
SDSDESLDDKYMKLHCDITPLAHDSEDYKLIEQYLLNTHAPTHKDWSLELEEVFSLDRDGELNKYSRYKNNLHNKM

SEQ ID NO: 155 - protein, 76 aa, Oryza sativa
QTTKLIEYYKETYKKEIEHPMLPCLDLSKSKSKQNYVPIEFCNIPEGERYPVARLDDKKSDNKGEQEKPSTKTTLR

SEQ ID NO: 156 - protein, 76 aa, Solanum lycopersicum
QLIWFKNKAAKHQMQAKALEESLSLVSEKHRQTLEENKIVRLKTKMHHEQIKEEMEFQEQFFKDQIKIIHDARTAR

SEQ ID NO: 157 - protein, 101 aa, Solanum lycopersicum
MAPKAEKKPAEKKPAEEKKAEKTPKAGKKLPKESGSSGADKKKKKSKKSIETYKIYIFKVLKQVHPDIGISSKSMGIMNSFINDIFEKLAQESSRLARINK

SEQ ID NO: 158 - protein, 101 aa, Zea mays
MKGAKSKGAAKADAKLAVKSKGAEKPAKGRKGKAGKDPNKPKRAPSAFFVFMEEFRKEFKEKNPKNKSVAAVGKAAGDRWKSLSESDKAPYVAKANKLKLE

SEQ ID NO: 159 - protein, 76 aa, Solanum lycopersicum
NVQLNSLLLERDESKKELHAIQKEYSEFKSNSDEKVASDATLGEQEKRLHQLEEQLGTALSEASKNEVLIADLTRE

SEQ ID NO: 160 - protein, 251 aa, Zea mays
KSSLKAEDGLLYPLEKGFFFLPKPPTLILHEEIEFVEFERHGAGGASISSHYFDLLVKLKNDQEHLFRNIQRNEYHNLFNFINGKNIKIMNLGGDGQGASGVVTDVLRDTDDDAVDPHLERIKNQAGDEESDEEDEDFVADKDDSGSPTDDSGDEESDASDSGGEKEKSSKKEASSSKPVQKRKHKARDDEGQEKKKPKKKKDPNAPKRAMTPFMYFSMAERGNMKSSNPDLPTTEIAKKLGEMWQKMSGE

SEQ ID NO: 161 - protein, 76 aa, Oryza sativa
MKEREKVVRLAKLAEQAERYDDMVEFMKTLARMDVDMSAEERLLFSVGFKKTIGARRASWRILESLEQKVTAGDQP

SEQ ID NO: 162 - protein, 176 aa, Oryza sativa
IGPSSRHFSETSSTIMFGQRAMKIVNTIRIKEEVDYESLYKKVEHEVDHLTSEMERQQKLKNSEKMQLEKKLKESEASLNDLKVTSNMQIENMAMEKRQLESTIKRLMLDLEKEKGKNNILSEQIIHLETSLDENKQKQLENISNTNILADTTKSHEKKIRELLKQLEDERSRSAS

SEQ ID NO: 163 - protein, 76 aa, Zea mays
MTKTYRISSGLLREAVKKITIARDSAFFVDKEILSKSSELKNSLINPCHNVVREFVRESRDCDSDDYKREYRLNDY

SEQ ID NO: 164 - protein, 76 aa, Zea mays
LDKKLAQRKHFPSVNWLISYSKYSKALESFYEKFDPDFIDIRTKAREVLQREDDLNEIVQLVGKDALAESDKITLE

SEQ ID NO: 165 - protein, 76 aa, Zea mays
VLKRISDVISKADRRHLEQLTGEFYTVIPHDFGFRKMREFIIDTPQKLKAKLEMVEALGEIEIATKLLEDDSSDQD

SEQ ID NO: 166 - protein, 76 aa, Zea mays
PMETEIDQGVVLPDSRRRQAERLDYKKLYDEAYGEASSDSSDDEEWSGKNTPIIKSNEEGEANSPAGKGSRVVHHN

SEQ ID NO: 167 - protein, 176 aa, Oryza sativa
ESTIKRLMLDLEKEKGKNNILSEQIIHLETSLDENKQKQLENISNTNILADTTKSHEKKIRELLKQLEDERSRSASMNDHLNVLQQQLSDAQNYFQKNIACELEKQLSRTTEEFASQISSLEERIADLISEKELVYEELKSTQEKMQQEMRHRQGLEDEILRLKQSLADNCSEESK

SEQ ID NO: 168 - protein, 76 aa, Solanum lycopersicum
MADSSREENVYLAKLAEQAERYEEMIEFMEKVAKTADVEELTVEERNLLSVAYKNVIGARRASWRIISSIEQKEES

SEQ ID NO: 169 - protein, 76 aa, Oryza sativa
MSREENVYMAKLAEQAERYEEMVEYMEKVAKTVDVEELTVEERNLLSVAYKNVIGARRASWRIVSSIEQKEEGRGN

SEQ ID NO: 170 - protein, 176 aa, Zea mays
KVALRREKKPREPTRAETELETHELRRLRRLARGIGRWARAKKAGVTDEVVKEVRREWASGEELAAVRIVEPLRRSMDRAREILEIKTGGLVVWTKGDMHFVYRGSKYQQNAKHSHTFLTNVHKDDAFQENDQSICGQKDEEPVKGTLYEREVNRLLDTLGPRFVDWWWDTPLPVD

SEQ ID NO: 171 - protein, 76 aa, Solanum lycopersicum
TQESLENSRSEVSDITVQLEQLRDLSSKLEREVSKLQMELEETRASLQRNIDETKHSSELLAAELTTTKELLKKTN

SEQ ID NO: 172 - protein, 76 aa, Solanum lycopersicum
MGKDEDEMRGEIEERLINEEYKIWKKNTPFLYDLVITHALEWPSLTVEWLPDREEPSGKDYSVQKMILGTHTSENE

SEQ ID NO: 173 - protein, 76 aa, Solanum lycopersicum
PLNACEWFKDYQSVSTGKQEIEHAYEFVKKKFEESYFQCTAPDRVDRVFKIYRTTALDQKLVKKTFKLVDETLRRR

SEQ ID NO: 174 - protein, 76 aa, Zea mays
PDDDTEMHLVYANRTDHDMLLREEIDRAWLPRTRRLKVWYVVSKVPEDGWEYGVGRVDEHVMREHLPLGDSETIAL

SEQ ID NO: 175 - protein, 76 aa, Solanum lycopersicum
KLEDSKTDIPENFDAVTLKHMSKDEMVTYFNNIMTKMKRHHESILQKKTDEYFVLRAEYLNLRGGSVVPHKKDKGE

SEQ ID NO: 176 - protein, 76 aa, Solanum lycopersicum
ISEKSHRLRQMRGEELQGLNIEELQQLERSLETGLSRVIERKGDKIMREINQLQQKGMHLMEENEKLRQQVMEISN

SEQ ID NO: 177 - protein, 76 aa, Solanum lycopersicum
DVFMEHGKMGEFLDGLRSLAKDEFKKLKKSIDELRGSNSVSNKISRSEMAKLEGILQEKESGIWVQLDKTLDNIRM

SEQ ID NO: 178 - protein, 76 aa, Oryza sativa
MAHLVWMLGENGEEKSFENPNELLPLSRLEEIGVLYWHLDPKKSESEEELTKIRRERGYSYFDLTEICPDKLENYE

SEQ ID NO: 179 - protein, 76 aa, Zea mays
EMRRLRKMQPQQPGYSSSRAYLELLADLPWQKVSEERELDLRVAKESLDQDHYGLTKVKQRIIEYLAVRKLKPDAR

SEQ ID NO: 180 - protein, 76 aa, Solanum lycopersicum
MTRIKRGYIARRRRTKIRLFASSFRGAHSRLTRTITQQKIRALVSAHRDRDRKKRDFRRLWITRINAVIRERGVSY

SEQ ID NO: 181 - protein, 76 aa, Oryza sativa
RDLVRDIIKCGGMKGIKVEDPFDVIEEDPSMRRAPAARRVDGMIDKMQKKLPGQPKFLLCVLAERKNSDIYGPWKR

SEQ ID NO: 182 - protein, 76 aa, Solanum lycopersicum
MATPMAEDSNFEDDQLHAMSTEDIIRASRLLDNEIRIIKEELQRTNLELDSFKEKIKENQEKIKLNKQLPYLVGNI

SEQ ID NO: 183 - protein, 76 aa, Solanum lycopersicum
LKTEVEKEKSLSSEMEAKCHELENDLRKKSQEAEAQQTSGSNSELKIKQEDLAVAADKLAECQKTIASLGKQLQSL

SEQ ID NO: 184 - protein, 76 aa, Solanum lycopersicum
MSRYRGPRFKKIRRLGALPGLTNKKPRTGSDLRNQSRSGKKSQYRIRLEEKQKLRFHYGLTERQLLKYVRIARKAK

SEQ ID NO: 185 - protein, 76 aa, Solanum lycopersicum
NHPEIMSPLAKSRRSEPGLTERFNLFVNRRELCDAYTELNDPTAQRERFAEQLKDRQLGDDEAMDLDESFITALEY

SEQ ID NO: 186 - protein, 276 aa, Oryza sativa
IGPSSRHFSETSSTIMFGQRAMKIVNTIRIKEEVDYESLYKKVEHEVDHLTSEMERQQKLKNSEKMQLEKKLKESEASLNDLKVTSNMQIENMAMEKRQLESTIKRLMLDLEKEKGKNNILSEQIIHLETSLDENKQKQLENISNTNILADTTKSHEKKIRELLKQLEDERSRSASMNDHLNVLQQQLSDAQNYFQKNIACELEKQLSRTTEEFASQISSLEERIADLISEKELVYEELKSTQEKMQQEMRHRQGLEDEILRLKQSLADNCSEESK

SEQ ID NO: 187 - protein, 76 aa, Oryza sativa
QLPWVPPPVEEPPSEEELARKAALKEKAGQRLRDMAAAKRSQKIAELEKQLSYLEELMEQLDGAEEEEATAILGRS

SEQ ID NO: 188 - protein, 276 aa, Zea mays
FLTCSDDSEPLIDKKVDDLRLPSEDSEDDDYDPAGPDSDKDVEKKSSSDESDFTSDSDDFCKEISKSGHDEVSSPLLPDAKVGDMEKITAQAKTTSSADDPMETEIDQGVVLPDSRRRQAERLDYKKLYDEAYGEASSDSSDDEEWSGKNTPIIKSNEEGEANSPAGKGSRVVHHNDELTTQSTKKSLHSIHGSVDEKPGDLTSNGSNSTARKGHFGPVINQKLHEHFKTQPYPSRSVKESLAEELGLTFRQVNKWFETRRHSARVASSRKGISLD

SEQ ID NO: 189 - protein, 76 aa, Solanum lycopersicum
MARKSLIQREKKRQKLEQKYHSIRRSSKKEISKVPSLSDKWEIYGKLQSLPRNSAPTRLHRRCFLTGRPRANYRDF

SEQ ID NO: 190 - protein, 76 aa, Oryza sativa
LPPHVACRVVDVELCADAATDEVYARLALRAEGEVFERNLHGGGIEREDDMEDGDEERKSRMLHMFCKTLTASDTS

SEQ ID NO: 191 - protein, 101 aa, Solanum lycopersicum
KTIVKLLRKIIEDRRGSKKIQQDMLGLMMNEEAKNRYTLSDEELIDQIITIMYSGFETVSTTSMMAVKYLHDHPKALEEIRKEHFAIREKKSLEDPIDYND

SEQ ID NO: 192 - protein, 76 aa, Zea mays
ADRELKEMLLKKYSGCLSRLRSEFLKKRKKGKLPKDARSALMDWWNTHYRWPYPTEEDKVRLAAATGLDPKQINNW

SEQ ID NO: 193 - protein, 76 aa, Zea mays
ELRPSELWASEKGYKAMTSNFRRYSYRELVKATRKFKVELGRGESGTVYKGVLEDDRHVAVKKLENVRQGKEVFQA

SEQ ID NO: 194 - protein, 76 aa, Zea mays
AILTGGEVITEELGMNLENVEPHMLGSCKKVTVSKDDTVILDGAGDKKSIEERADQIRSAVENSTSDYDKEKLQER

SEQ ID NO: 195 - protein, 76 aa, Zea mays
MGRRACCAKEGVKRGAWTSKEDDALAAYVKAHGEGKWREVPQKAGLRRCGKSCRLRWLNYLRPNIRRGNISYDEED

SEQ ID NO: 196 - protein, 76 aa, Zea mays
MAKKSLIQREKKRQKLEQKYHLIRRSSKKKIRSKVSPLSLSEKTKMQEKLQSLPRNSAPTRLHRRCFLTGRPRANY

SEQ ID NO: 197 - protein, 126 aa, Zea mays
MAPKAEKKPAEKKPTEEKAEKKPRAEKRVPGKEGGEKKGKKKAKKSVETYKIYIFKVLKQVHPDIGISSKAMSIMNSFINDIFEKLAAEAAKLARYNKKPTITSREIQTSVRLVLPGELAKHAVSE

SEQ ID NO: 198 - protein, 76 aa, Zea mays
VRQELKHELKQGYRDKLVDIREEILRKRRAGKLPGDTASTLKAWWQAHSKWPYPTEEDKARLVQETGLQLKQINNW

SEQ ID NO: 199 - protein, 76 aa, Oryza sativa
AYQTARLFDVRDLRGKRFEFVHIWDKKRCRYMLGDLGVNDNDGWRGFVKAKRLATRDTVVFMRRGGGDGDGDGELL

SEQ ID NO: 200 - protein, 76 aa, Oryza sativa
MEGGRSWSIESYLNEYFDIPAKNPPGEARRRWRRAVGLIVRNRRRRFGRFSDVDAIDEAQRRKILVRVKQYHLPPE

SEQ ID NO: 201 - protein, 101 aa, Solanum lycopersicum
KPAEKKPAEKTPVAEKAPAEKKPKAGKKLPKDAAAGDKKKKRSKKAVETYKIYIFKVLKQVHPDIGISSKAMGIMNSFINDIFEKLAQEASRLARYNKKPT

SEQ ID NO: 202 - protein, 76 aa, Zea mays
NAKDITDDDKQELDEALQREIQAAFRTDEIRRAQPTPQAEMRYGMSYIHETVWKGVPKFLRRVDTALKNIGINERL

SEQ ID NO: 203 - protein, 176 aa, Solanum lycopersicum
NEVEELNLGFNMINESNDTSAGSTRKIEIEDLEMECLIMQEICGVISGEGIKEAKDMLKELYLEHLNEKEIRTSLDTKLIEMENKLKFEVEEKDRLMQMEKLVNEKEKLATDASAALAKERVQSEQVRQELNAAKEFASQQQTLASGCNKEVNVIKGQLAEAVERIEVLKEEVAQL

SEQ ID NO: 204 - protein, 101 aa, Solanum lycopersicum
MQIFVKTLTGKTITLEVESSDTIDNVKAKIQDKEGIPPDQQRLIFAGKQLEDGRTLADYNIQKESTLHLVLRLRGGAKKRKKKTYTKPKKIKHKKKKVKLA

SEQ ID NO: 205 - protein, 76 aa, Solanum lycopersicum
RPLIIEYPEKQLRDELKCTTWRFVVETNNLSPWKTIPEECADYVKEYMVGPGYKMEIDRVSDEAGEYAKSVDLGDD

SEQ ID NO: 206 - protein, 176 aa, Oryza sativa
MATREHELRPEQERLGEDREEYEDGEEEEEEGEEGWDDWESDGDDAGGGGGGGGLLCLFCSARFDSESSLFSHCASEHRFDFYRVVKETGMDFYGCIKLINFVRSKVAENKCWSCGQVFSSNSELCGHLHALEIPQLEGKVPWGDDVYLKPFLEDDSLLHSLSVFDDDDEDDCGMP

SEQ ID NO: 207 - protein, 176 aa, Zea mays
EISFEEQLSMLDSVHLKVRLSKATELVDRHLQSILVAEKITQKVEGQLSKSQKEFLLRQQMRAIKEELGDNDDDEDDVAALERKMQNAGMPANIWKHAQREMRRLRKMQPQQPGYSSSRAYLELLADLPWQKVSEERELDLRVAKESLDQDHYGLTKVKQRIIEYLAVRKLKPDAR

SEQ ID NO: 208 - protein, 76 aa, Oryza sativa
MDPSSKSPDDDDLRPEAEAARRPQPQPQPREWRFAQVFGERAAGEDVQEVDIISAIEFDKSGDHLATGDRGGRVVL

SEQ ID NO: 209 - protein, 76 aa, Oryza sativa
MDSTYALHLAVATLLGASFAAASAYYMHRKTLDQLLRFARSLDRDHRRRNRHLLDADDDDDDDPPRDHDRRTTLPI

SEQ ID NO: 210 - protein, 176 aa, Solanum lycopersicum
KLEDSKTDIPENFDAVTLKHMSKDEMVTYFNNIMTKMKRHHESILQKKTDEYFVLRAEYLNLRGGSVVPHKKDKGESDILRKKIPEIIFKLDDILVENEKHPAFTQETLSFGNLKDRLDNLLSENHQLRDLVKEKKNEVKSLLSQVSDATEKRLQHSLAEAGMLKQIGELNLAMEE

SEQ ID NO: 211 - protein, 101 aa, Solanum lycopersicum
IVNLLRTLIEERRASKEIQHDMLGYLMNEEATRFKLTDDEMIDLIITILYSGYETVSTTSMMAVKYLHDHPKVLEELRKEHMAIREKKKPEDPIDYNDYRS

SEQ ID NO: 212 - protein, 101 aa, Solanum lycopersicum
KQEQEGSTEEDPYPSPSLFSEEGWDPDKIDETEEIRVNGKDKIKDKFHSHLTETGYNNINTSNSPIYDYQDSYLNNNNTGNLENCKLQLLDKKNENQEQDL

SEQ ID NO: 213 - protein, 76 aa, Zea mays
HVDDFVRVIRKLYQFYSSCSPSAPKTKTTTNDSMDDTLMENEDDEFQNYLHELKDYDQVESNELDKYMSEPLLKHS

SEQ ID NO: 214 - protein, 176 aa, Solanum lycopersicum
KEDLVKQHAKVAEEAIAGWEKAENEVAVLKQQLDAAVQQNLTLEVRVSHLDGALKECVRQLRQARDEQEKMIQDAMAEKNEMESEKTALEKQLLKLQTQVEAGKAEMPTSTDPDILVRLKYLEKENAALKIELVSCSEVLEIRTIERDLSTQAAETASKQQLESIKKLTKLEVECR

SEQ ID NO: 215 - protein, 76 aa, Zea mays
MASAELSREENVYMAKLAEQAERYEEMVEFMEKVAKTVDSEELTVEERNLLSVAYKNVIGARRASWRIISSIEQKE

SEQ ID NO: 216 - protein, 76 aa, Zea mays; identical to SEQ ID NO: 215

SEQ ID NO: 217 - protein, 76 aa, Zea mays
THLRDLMADADRCKAMTAEYEGIFLDYSRQQATGETMEKLLKLADAAKLKEKIEKMFKGEKINSTENRSVLHVALR

SEQ ID NO: 218 - protein, 76 aa, Oryza sativa
AWTKDPLKFDNSYFIELLKENSEGLLKLPTDKALVEDPTFRRYVELYAKDEDAFFRDYAESHKKLSELGFTPPRSA

SEQ ID NO: 219 - protein, 76 aa, Zea mays
DDAVAAEVKIKSKTIDVMPTKATLRSDNQEMSKEELRRQHQAELARQKNEETARRLAGVGTGSGDGRGPARASNEL

SEQ ID NO: 220 - protein, 76 aa, Zea mays
VELQRSQSNMDLGSCEVIQHLLGVTKTVESTIPEKETNVKAPEKKGSNYSESKGETAKSFDDDDDYPKKQNGDYPK

SEQ ID NO: 221 - protein, 76 aa, Oryza sativa
HHHQRQQRRGSRTRDPRVRRGPLRIPYGEDEKEEPPATPIASSNKNKREEPPTKHRPMARPPGGGGPLSKGEVKLL

SEQ ID NO: 222 - protein, 76 aa, Oryza sativa
ADKEIYHYDVAIAPELRSRERNRNIINELLRSHKKYLDGRRSPAYDGRKGMFTAGALPFTDREFVVKIANDPERGN

SEQ ID NO: 223 - protein, 76 aa, Solanum lycopersicum
MESPRVEESYDKMSELKAFDDTKAGVKGLVDSGITKVPQIFVLPPKDRAKKCETHFVFPVIDLQGIDEDPIKHKEI

SEQ ID NO: 224 - protein, 76 aa, Solanum lycopersicum
NEVEELNLGFNMINESNDTSAGSTRKIEIEDLEMECLIMQEICGVISGEGIKEAKDMLKELYLEHLNEKEIRTSLD

SEQ ID NO: 225 - protein, 176 aa, Oryza sativa
MDPSSKSPDDDDLRPEAEAARRPQPQPQPREWRFAQVFGERAAGEDVQEVDIISAIEFDKSGDHLATGDRGGRVVLFERTDSRDSASRSELERQDYPIARHPEFRYKTEFQSHEPEFDYLKSLEIEEKINKIKWCQTANNALFLLSTNDKTIKYWKVQERKVKRISVMNLNTSQSS

SEQ ID NO: 226 - protein, 176 aa, Solanum lycopersicum
MATPMAEDSNFEDDQLHAMSTEDIIRASRLLDNEIRIIKEELQRTNLELDSFKEKIKENQEKIKLNKQLPYLVGNIVEILEMNPEEEAEEDGANIDLDSQRKGKCVVLKTSTRQTIFLPVVGLVDPDNLKPGDLVGVNKDSYLILDTLPSEYDSRVKAMEVDEKPTEDYHDIGGLE

SEQ ID NO: 227 - protein, 76 aa, Solanum lycopersicum
SLNLKGLSLFSDQEQRRANSEKRTKFVKFVFNALDPNETKSGKKSIGIKEISKKVPRWSHKLITELDQQMGEFKDR

SEQ ID NO: 228 - protein, 76 aa, Zea mays
PIRESVRVSTDRDPDLEDEKREQLGESMQTELERLTWGVEVGTSEDINVDTVKRWGLQNNKYNAEHWIPPGGQRTA

SEQ ID NO: 229 - protein, 76 aa, Solanum lycopersicum
ENENLGDEILEDFETYWEDVNDRLMVSRMVSDSVIKGIVSAVEQEAAERLVTKDMELANLKEYLQFHEGGLSKTEL

SEQ ID NO: 230 - protein, 76 aa, Zea mays
MANSSSGLAVSDECKVKFRDLKARRSFRFIVFRIDDKDMEIKVDRLGEPNQGYGDFTDSLPADECRYAIYDLDFTT

SEQ ID NO: 231 - protein, 76 aa, Zea mays
KSFISVAMDIDPEWNMIKRDLGRIEKWVMRKAFDDDEHPYLPKHILYRQKEQFSDGVGYNWIDGLKSFTEQQVTDE

SEQ ID NO: 232 - protein, 76 aa, Zea mays
GKFSMEEGRNRLFRELTDINAGLLGGFHIQDYFPRLGRIELVRKVACAKTRRVRKRWDDLLDKLIDDHAARMATHQ

SEQ ID NO: 233 - protein, 76 aa, Solanum lycopersicum
EAGKAEMPTSTDPDILVRLKYLEKENAALKIELVSCSEVLEIRTIERDLSTQAAETASKQQLESIKKLTKLEVECR

SEQ ID NO: 234 - protein, 76 aa, Solanum lycopersicum
LSDDEFVEEFLIESAKRLRERYEKFTRGLEEIGIKCLESNAGVYCWMDLRSLLKEATLDAEMSLWKLIINEVKLNV

SEQ ID NO: 235 - protein, 176 aa, Zea mays
KNQSLDKIRPEKELERAKSEILRCKLRIREVFRNIDSLLSKGKIDETLFDSEGEISCEDIFCSTCGSNDATLGNDIILCDGACDRGFHQNCLNPPLRTEDIPMGDEGWLCPACDCKIDCIDLINELHGSNISIEDSWEKVFPDAAAMANDSKQDDAFDLPSDDSDDNDFDPNMPEE

SEQ ID NO: 236 - protein, 76 aa, Solanum lycopersicum
AEGGCEDEGVDDQAVRVVDIVDTFRLQEQPAFDKKQFVTFMKRYIKNLTPKLEGETQEAFKKNIEAATKFLLQKIK

SEQ ID NO: 237 - protein, 176 aa, Oryza sativa
MAHLVWMLGENGEEKSFENPNELLPLSRLEEIGVLYWHLDPKKSESEEELTKIRRERGYSYFDLTEICPDKLENYEEKLKSFYCEHIHADEEIRYCLEGSGYFDVRDKDDKWIRIWIKEGDMIILPAGIYHRFIVDSNNYIKLMRLFIGEPVWTAYNRPQEDHPVRQEYVKNVKGD

SEQ ID NO: 238 - protein, 101 aa, Zea mays
MQIFVKTLTGKTITLEVESSDTIDNVKAKIQDKEGIPPDQQRLIFAGKQLEDGRTLADYNIQKESTLHLVLRLRGGAKKRKKKTYTKPKKIKHKHKKVKLA

SEQ ID NO: 239 - protein, 76 aa, Zea mays
KHYKRDDTRIGLAFDVMGRVPYGTSFLDKQAEERSWDINLGWFLEPVVRGDYPFSMRSLARERLPFFKDEQKEKLA

SEQ ID NO: 240 - protein, 76 aa, Solanum lycopersicum
KEDLVKQHAKVAEEAIAGWEKAENEVAVLKQQLDAAVQQNLTLEVRVSHLDGALKECVRQLRQARDEQEKMIQDAM

SEQ ID NO: 241 - protein, 76 aa, Solanum lycopersicum
MEEKPFPAWSWSVDQCLKEYQVKLEKGLSTYEVDKRRERYGLNELEKEKGKPLWRLVLEQFDDTLVKILLGAAFIS

SEQ ID NO: 242 - protein, 76 aa, Zea mays
MTSFKLVKYTPRIKKKKGLRKLARKVPTDRLLKFERVFKAQKRIHMSVFKAQRVLDEIRWRYYEETVMILNLMPYR

SEQ ID NO: 243 - protein, 76 aa, Oryza sativa
QSWTVEWLKFDNSYFKDIKEQRDQDLLVLPTDAALFEDPSFKVYAEKYAEDQEAFFKDYAEAHAKLSDLGAKFDPP

SEQ ID NO: 244 - protein, 76 aa, Zea mays
MAALGPKMERLSSIDAQLRMLVPGKVSEDDKLIEYDALLLDRFLDILQDLHGDDLKEMVQECYEVAAEYETKHDLQ

SEQ ID NO: 245 - protein, 76 aa, Solanum lycopersicum
QLTNILRDVGEDARRGRVYLPQDELAQAGLSDEDIFAGKVTDKWRIFMKKQIQRARKFFDEAEKGVTELSSASRWP

SEQ ID NO: 246 - protein, 76 aa, Oryza sativa
PTSSEVGEVQNLLQNEKVLRQSAEDEANDLKNQVLHWKKMEAAATAEVVKLRKMLDTEASQKEKLDEEIAVLKSQL

SEQ ID NO: 247 - protein, 76 aa, Solanum lycopersicum
HEKDDILDKINNWTRAFMEQKLLNNGFIDRMSKKEVELALRKFYTTSHLAENRRYIKSYEENNFKILKAAYRSPNI

SEQ ID NO: 248 - protein, 176 aa, Solanum lycopersicum
PELDQFMEAYYDMLVKYREELTRPLQEAMEFMQKIEAQLNMLGNAPVRIFNSEDKCEGVGSSEEDQDNSGGETELPEIDPRAEDRELKNHLLRKYSGYLSSLKQELSKKKKKGKLPKDARQKLITWWELHYKWPYPSESEKVALAESTGLDQKQINNWFINQRKRHWKPSEDMQFM

SEQ ID NO: 249 - protein, 76 aa, Oryza sativa
MAPSDDLVYMAKLAEQAERYDEMVEAMNSVAKLDEGLTKEERNLLSVGYKNLIGAKRAAMRIIGSIELKEETKGKE

SEQ ID NO: 250 - protein, 76 aa, Zea mays
MEQYEKVEKIGEGTYGVVYKALDKATNETIALKKIRLEQEDEGVPSTAIREISLLKEMNHGNIVRLHDVVHSEKRI

SEQ ID NO: 251 - protein, 76 aa, Oryza sativa
NYLPMEVCKIVEGQRYSKRLNQNQIRALLEETCQHPRDRERDIIKMVKHNAYQDDPYAKEFGIKISDRLASVEARI

SEQ ID NO: 252 - protein, 76 aa, Solanum lycopersicum
SLKQELSKKKKKGKLPKDARQKLITWWELHYKWPYPSESEKVALAESTGLDQKQINNWFINQRKRHWKPSEDMQFM

SEQ ID NO: 253 - protein, 76 aa, Zea mays
LKPLIDKKAWPYVQNDLRLRASYLRYDLKTVIASKPKEEKKSLKELTGKLFSTIDDLDHAAKMKSTPEAEKYFAAT

SEQ ID NO: 254 - protein, 76 aa, Zea mays
IPMGDEGWLCPACDCKIDCIDLINELHGSNISIEDSWEKVFPDAAAMANDSKQDDAFDLPSDDSDDNDFDPNMPEE

SEQ ID NO: 255 - protein, 76 aa, Zea mays
KAHGLAPEIPEDLYFLIKKAVAIRKHLERNRKDKDSKFRLILVESRIHRLARYYKRTKKLPPTWKYESTTASTLVA

SEQ ID NO: 256 - protein, 76 aa, Zea mays
VLSKQFNVFALDKASVQVATLVSELDSAAKIEYNRIIAEDRKRKKAKWGDKQINEDENILLQDKGVDTFNGDVHSE

SEQ ID NO: 257 - protein, 76 aa, Solanum lycopersicum
QELKHELKQGYKEKIVDIREEILRKRRAGKLPGDTTSVLKAWWQSHSKWPYPTEEDKARLVQETGLQLKQINNWFI

SEQ ID NO: 258 - protein, 176 aa, Solanum lycopersicum
HDSPNIENPLAAEYNSISQRVVELEQKLEKIEAEKAELENAFNESQDALKVSSLQLKETQTRLEGLQKELDVVNESKELLEFQLYGMEVEARTMSVNIDSLKTEVEKEKSLSSEMEAKCHELENDLRKKSQEAEAQQTSGSNSELKIKQEDLAVAADKLAECQKTIASLGKQLQSL

SEQ ID NO: 259 - protein, 176 aa, Solanum lycopersicum
ENENLGDEILEDFETYWEDVNDRLMVSRMVSDSVIKGIVSAVEQEAAERLVTKDMELANLKEYLQFHEGGLSKTELESFGSLMSQNELESMDFRKCMTLSDVFMEHGKMGEFLDGLRSLAKDEFKKLKKSIDELRGSNSVSNKISRSEMAKLEGILQEKESGIWVQLDKTLDNIRM

SEQ ID NO: 260 - protein, 76 aa, Zea mays
DITPDDKQELDEALQREIQAAFRTDEIRRTQPTPQDEMRAGMSYFHETIWKGVPKFLRRVDTALKNIGINERVPYN

SEQ ID NO: 261 - protein, 76 aa, Solanum lycopersicum
LSGRAWDLVLEQRIAFTRKKDFGKEQRELQWAHAQRTLHGLQVPDIKLFSEATNFNELNQLAEEAKRRAEIARQRE

SEQ ID NO: 262 - protein, 76 aa, Zea mays
RNLKGLQDKMELVAIDLQDKPAWYKDKVYAQGTVPSLEHDSEVRGESLDLIRYIDSNFDGPALLPEDAAKRQFADE

SEQ ID NO: 263 - protein, 76 aa, Zea mays
PDEEGLISFLVKDNGFNEDRVTKAIEKIKSAKNKSSQGRLESFFKPTATTSAPLKRKETSDKTSKAAANKKTKAGG

SEQ ID NO: 264 - protein, 176 aa, Solanum lycopersicum
MAREKIQIKKIDNSTARQVTFSKRRRGLFKKAEELSVLCDADVALIIFSSTGKLFDYSSSSMKQILERRDLHSKNLEKLDQPSLELQLVENSNYSRLSKEISEKSHRLRQMRGEELQGLNIEELQQLERSLETGLSRVIERKGDKIMREINQLQQKGMHLMEENEKLRQQVMEISN

SEQ ID NO: 265 - protein, 201 aa, Solanum lycopersicum
PQGHRGMSLLIFEASAVGYIEADRLSEHFSENGRNRDAWERRSARFYPGGKRLLYGYMADKKDIDNFNQHSAGKSKLKFEMRSYKEAVWNPAKQMREDNQQLIWFKNKAAKHQMQAKALEESLSLVSEKHRQTLEENKIVRLKTKMHHEQIKEEMEFQEQFFKDQIKIIHDARTAREDNFEKTQQEQREMVKQSNANTASV

SEQ ID NO: 266 - protein, 76 aa, Zea mays
MSSSSLSPTAGRTSGSDGDSAADTHRREKRRLSNRESARRSRLRKQQHLDELVQEVARLQADNARVAARARDIASQ

SEQ ID NO: 267 - protein, 276 aa, Solanum lycopersicum
NEVEELNLGFNMINESNDTSAGSTRKIEIEDLEMECLIMQEICGVISGEGIKEAKDMLKELYLEHLNEKEIRTSLDTKLIEMENKLKFEVEEKDRLMQMEKLVNEKEKLATDASAALAKERVQSEQVRQELNAAKEFASQQQTLASGCNKEVNVIKGQLAEAVERIEVLKEEVAQLNISLEEKTEELKEANHRANMVLAISEERQTLLSSLESKEIALRKQVEKIIGNINESSKMIADFECRVTGRLKTNNARFEHSFSQMDCLVKKANLLRRTTL

SEQ ID NO: 268 - protein, 276 aa, Solanum lycopersicum
KLEDSKTDIPENFDAVTLKHMSKDEMVTYFNNIMTKMKRHHESILQKKTDEYFVLRAEYLNLRGGSVVPHKKDKGESDILRKKIPEIIFKLDDILVENEKHPAFTQETLSFGNLKDRLDNLLSENHQLRDLVKEKKNEVKSLLSQVSDATEKRLQHSLAEAGMLKQIGELNLAMEESLIGGSVREDVYTCFLRDLSGGARNEVEELNLGFNMINESNDTSAGSTRKIEIEDLEMECLIMQEICGVISGEGIKEAKDMLKELYLEHLNEKEIRTSLD

SEQ ID NO: 269 - protein, 76 aa, Zea mays
ETHESNGKESTEVDTKNDKFETENFSFLPKMVYDRHEEYQYLNLVEDIIRSGAQKNDRTGTGTLSKFGCQMRFNLR

SEQ ID NO: 270 - protein, 76 aa, Zea mays
RVEAQLDCISGGGGSSSARLSLADGKSEGVGSSEDDMDPNGRENDPPEIDPRAEDKELKYQLLKKYSGYLSSLRQE

SEQ ID NO: 271 - protein, 276 aa, Solanum lycopersicum
SLNLKGLSLFSDQEQRRANSEKRTKFVKFVFNALDPNETKSGKKSIGIKEISKKVPRWSHKLITELDQQMGEFKDRASMDHQLRSRKAKRVVIFTDNKATKDAEEEVALISYSQQSDFRRGIITGSMRAQRRKTFISKLFQANVHSPLFVDRITPLRLFSFDISELIKPILKNWTDKEGEFKILESREEQTKREEKKEKDKKEDNKRKEQARIAIEEAWDTIPLAQIIRGYMLITQSILRKYILLPALIIAKNIGRMLFLQLPEWSEDLQEWNREM

SEQ ID NO: 272 - protein, 101 aa, Zea mays
KEFSLKYQKEVDRFFFILQELHILPRSSSLKVLDNSIIGVDTQLTKNTRSRLGGLVRVKRKKSHTELKIFSGDIHFPEEADKILGGSLIPPEREKKDSKES

SEQ ID NO: 273 - protein, 201 aa, Zea mays
FEGKFHNKTNNHWSDRKNFKCYAKKYTWLEMDYGETEKEIEKGSITDQIKETKLETRIAQFISLICNISMMKQRMVEIGYNAEKLPLGKLRKATILKGYHVLKRISDVISKADRRHLEQLTGEFYTVIPHDFGFRKMREFIIDTPQKLKAKLEMVEALGEIEIATKLLEDDSSDQDDPLYARYKQLHCDFTPLEADSDEYS

SEQ ID NO: 274 - protein, 76 aa, Solanum lycopersicum
HDSPNIENPLAAEYNSISQRVVELEQKLEKIEAEKAELENAFNESQDALKVSSLQLKETQTRLEGLQKELDVVNES

SEQ ID NO: 275 - protein, 176 aa, Oryza sativa
MENQFQDGKEEVIEAWYMDDSEEDQRLPHHREPKEFIPLSKLSELGILSWRLNADDWENDENLKKIREARGYSYMDICDVCPEKLPNYEAKLKNFFEEHLHTDEEIRYCLEGSGYFDVRDQNDQWIRVAVKKGGMIVLPAGMYHRFTLDSDNYIKAMRLFVGEPVWTPYNRPHDHL

SEQ ID NO: 276 - protein, 76 aa, Zea mays
MSRYRGPRLKKIRRLGALPGLTRKTPKSGSNQKKKFHSGKKEQYRIRLQEKQKLRFHYGLTERQLLRYVHIAGKAK

SEQ ID NO: 277 - protein, 76 aa, Solanum lycopersicum
YALPHAILRLDLAGRDLTDYLMMILTERGYSFTTAAEREIVRDVKEKLAYVALDYEQELETTKNGKDAEKSYELPD

SEQ ID NO: 278 - protein, 176 aa, Solanum lycopersicum
MGRGRVQLKRIENKINRQVTFSKRRSGLLKKAHEISVLCDAEVGLIVFSTKGKLFEYANDSCMERILERYERYSFAEKQLVPTDHTSPVSWTLEHRKLKARLEVLQRNQKHYVGEDLESLSMKELQNLEHQLDSALKHIRSRKNQLMHESISVLQKKDRALQEQNNQLSKKVKERE

SEQ ID NO: 279 - protein, 76 aa, Solanum lycopersicum
MASSKERENFVYVAKLAEQAERYDEMVEAMKNVANMDVELTVEERNLLSVGYKNVVGSRRASWRILSSIEQKEESR

SEQ ID NO: 280 - protein, 76 aa, Zea mays
ELKNELKQGYKEKLVDIREEIMRKRRAGKLPGDTASVLKAWWQAHSKWPYPTEDDKARLVQETGLQLKQINNWFIN

SEQ ID NO: 281 - protein, 76 aa, Zea mays; identical to SEQ ID NO: 280

SEQ ID NO: 282 - protein, 251 aa, Oryza sativa
KLVVVDLAGSERIDKSGSEGHTLEEAKSINLSLSALGKCINALAENSPHVPVRDSKLTRLLKDSFGGTARTSLVVTIGPSPRHRGETTSTIMFGQRAMKVENMVKLKEEFDYKSLCRRLDIELDKLIAENERQRKYFDDEIERITAEAQLRVTEAEREYKISLENEKAKYHQEYLDSIKILEEKWKIHQQSPKKLIKETEPTSSEVGEVQNLLQNEKVLRQSAEDEANDLKNQVLHWKKMEAAATAEVVKL

SEQ ID NO: 283 - protein, 76 aa, Oryza sativa
MSAQAELSREENVYMAKLAEQAERYEEMVEFMEKVAKTVDSEELTVEERNLLSVAYKNVIGARRASWRIISSIEQK

SEQ ID NO: 284 - protein, 76 aa, Oryza sativa
MSQPAELSREENVYMAKLAEQAERYEEMVEFMEKVAKTVDSEELTVEERNLLSVAYKNVIGARRASWRIISSIEQK

SEQ ID NO: 285 - protein, 76 aa, Solanum lycopersicum
MASPREENVYMANVADEAERYEEMVEFMEKVVAALNGEELTVEERNLLSVAYKNVIGARRASWRIISSIEQKEESR

SEQ ID NO: 286 - protein, 176 aa, Zea mays
GKFSMEEGRNRLFRELTDINAGLLGGFHIQDYFPRLGRIELVRKVACAKTRRVRKRWDDLLDKLIDDHAARMATHQDEDDDKDFIYVLLSLQKEYGLTRDHIKAILIDMFEAGTDTSYMTLEFAMTELIRKPHLMKKLQEEVRRNVPAGQEMVTEDNLPGMTDLKAVIKETLRLHP

SEQ ID NO: 287 - protein, 76 aa, Zea mays
MGISRDSMHKRRATGGKQKAWRKKRKYELGRQPANTKLSSNKTVRRVRVRGGNVKWRALRLDTGNYSWGSEAVTRK

SEQ ID NO: 288 - protein, 76 aa, Zea mays
EEKARRRGVRLHTPLGQETPQTVSAHGIMMEVRERRKMDLARVSPGDGRSREEVLGEPLTPSEVRALVKPHISHNR

SEQ ID NO: 289 - protein, 201 aa, Zea mays
IPVDKDGGTFQDESPFSSSNVMFGGNLGPKNAIIRPIKLPEVPKLPPYTTWIFLDRNQRMTEDQSVLGRRRIYYDTSCGEALICSDSEDEAIEDEEEKKEFKHSEDHIIRMTVQECGMSDAVLQTLARHMERAADDIKARYEILHGEKTKDSCKKGTEHNVKVEDLYCDKDLDAALDSFDNLFCRRCLVFDCKLHGCSQDL

SEQ ID NO: 290 - protein, 76 aa, Zea mays
MASGQESRKELDRKAREGETVVPGGTGGKSVEAQEHLAEGRSRGGQTRREQLGQQGYSEMGKKGGLSTTDESGGER

SEQ ID NO: 291 - protein, 76 aa, Zea mays
MVYVDSWEEFVERSVQLFRGDPNATRYVMKYRHCEGKLVLKVTDDRECLKFKTDQAQDAKKMEKLNNIFFALMTRG

SEQ ID NO: 292 - protein, 76 aa, Solanum lycopersicum
MASSKERESLVYIARLAEQAERYDEMVDAMKNVANLDVELTVEERNLLSVGYKNVVGSRRASWRILSSIEQKEDAR

SEQ ID NO: 293 - protein, 101 aa, Zea mays
IPEACSSETEVQSHKIGDKAFNSKQNHLTGSQSSLSFNTVDTPEPPEDNTVKRCSKKRSSIEDVNAKLDTITSEPLRHEKKRKSRRKISARLNSVSSEHTD

SEQ ID NO: 294 - protein, 76 aa, Solanum lycopersicum
MGSLCSRNKHYSQADDEENTQTAEIERRIEQETKAEKHIQKLLLLGAGDSGKSTIFKQIKLLFQTGFDEEELKNYI

SEQ ID NO: 295 - protein, 76 aa, Oryza sativa
MSPAEASREENVYMAKLAEQAERYEEMVEFMEKVAKTTDVGELTVEERNLLSVAYKNVIGARRASWRIISSIEQKE

SEQ ID NO: 296 - protein, 76 aa, Zea mays
LHFHLHNHIMVGNKKTKDVQFYVEVMDVVQTLGGSRRSALDPDEIEEEQRERDRKNRINMDFQNFVNKVNDHWSQP

SEQ ID NO: 297 - protein, 76 aa, Solanum lycopersicum
MASPREENVYMAKLAEQAERYEEMVEFMEKVVAAADGAEELTVEERNLLSVAYKNVIGARRASWRIISSIEQKEES

SEQ ID NO: 298 - protein, 76 aa, Solanum lycopersicum
FGICPLLETKRVEGLCTNCCAGKKGCKYFSKDGTYICDGESEWVSEKDNNLEKDCTKECDTRIDFGICPLLETKRV

SEQ ID NO: 299 - protein, 101 aa, Zea mays
AAFLSIRLGGATATRFAGLAVASQPAERRAAAMVAMAKREQELEEIRAMTTEQMEEEVVDLKGELFLLRLKRSARQEFKNSEFSRMRKRIARMLTVKRERE

SEQ ID NO: 300 - protein, 76 aa, Zea mays
MGRSPCCEKAHTNRGAWTKEEDERLVAYIRAHGEGCWRSLPKAAGLLRCGKSCRLRWINYLRPDLKRGNFTADEDD

SEQ ID NO: 301 - protein, 126 aa, Oryza sativa
DDTPKAVFPSVVGSIEQTGETDEAKADKEAEAASDSKNGAKPMDVDKAKTKRKLYVGQELEFRRDHMEVISPMKDGTVTDWDIVDNIWNHAFRQRLLINPEEHPMLIAEPSTNTGQQREKAAELMF

SEQ ID NO: 302 - protein, 76 aa, Oryza sativa
SVSKAKVKLLVNHFIVKYRQASTVFHYDIDIKLDISSPKASDKELSKGDFLTVKDELFKDESFRRLSSAVAYDGKR

SEQ ID NO: 303 - protein, 176 aa, Solanum lycopersicum
QFSPVGENKKSGEVYRLFDVGGQRNERRKWIHLFEGVTAVIFCAAISEYDQTLFEDERKNRMMETKELFEWVLKQPCFEKTSFMLFLNKFDIFEQKVPKVPLNACEWFKDYQSVSTGKQEIEHAYEFVKKKFEESYFQCTAPDRVDRVFKIYRTTALDQKLVKKTFKLVDETLRRR

SEQ ID NO: 304 - protein, 76 aa, Solanum lycopersicum
SLMTHAKTKGLRVKIHRELAELLEEDLRQRGTSVVPPGEVYGRWGGMEFKDKEIVWPPMVIIMNTRLDKDENDKWI

SEQ ID NO: 305 - protein, 176 aa, Oryza sativa
MENEFQDGKTEVIEAWYMDDSEEDQRLPHHREPKEFIHVDKLTELGVISWRLNPDNWENCENLKRIREARGYSYVDICDVCPEKLPNYETKIKSFFEEHLHTDEEIRYCLEGSGYFDVRDQNDQWIRIALKKGGMIVLPAGMYHRFTLDTDNYIKAMRLFVGDPVWTPYNRPHDHL

SEQ ID NO: 306 - protein, 76 aa, Solanum lycopersicum
MGRDTIAEIITSIRNADMDRKRVVRIASTNITENIVQILLREGFIENVRKHRENNKYFLVLTLRHRRNRKRPYRNI

SEQ ID NO: 307 - protein, 151 aa, Zea mays
KSSLKAEDGLLYPLEKGFFFLPKPPTLILHEEIEFVEFERHGAGGASISSHYFDLLVKLKNDQEHLFRNIQRNEYHNLFNFINGKNIKIMNLGGDGQGASGVVTDVLRDTDDDAVDPHLERIKNQAGDEESDEEDEDFVADKDDSGSPTDD

SEQ ID NO: 308 - protein, 76 aa, Zea mays
KSEKDHGKDINLIEPYKYDEVVSLKKLHLAIIMHEYPFNIVEHEYFVEFVKSLRPHFPIKSRVTARKYIMDLYLEE

SEQ ID NO: 309 - protein, 76 aa, Solanum lycopersicum
KISCSLNLQTEKLCYEDNDNDLDEELMPKHIALIMDGNRRWAKDKGLEVYEGHKHIIPKLKEICDISSKLGIQIIT

SEQ ID NO: 310 - protein, 76 aa, Zea mays
MGKEKTHINIVVIGHVDSGKSTTTGHLIYKLGGIDKRVIERFEKEAAEMNKRSFKYAWVLDKLKAERERGITIDIA

SEQ ID NO: 311 - protein, 76 aa, Zea mays
KFRSFTIEGSSHLIKQTEKGVDLIASLCHNYHTSEERLKEMLHKSHNAIEDIFHMKALSASECKPENLDKIDTDDL

SEQ ID NO: 312 - protein, 176 aa, Oryza sativa
MGSQVNDVEEVVQAWYMDDDDNAEEDQRLPHRRQPDDLLPLAKLLDLGLVAMRLDADNHEHDENLKIMREQRGYLHMDIVELTPEKMPNYEVMIKRFFEEHLHTDEEVRYCLDGSGYFDVRDENDKWVRVSVRKGALIVVPAGIYHRFTLDTNNYIKTMRLFSGGPDWTAYNRPHD

SEQ ID NO: 313 - protein, 76 aa, Zea mays
KGVSERGAKKIRVHILTDGRDVLDGSSIGFVETLENDLLELRAKGVDAQIASGGGRMYVTMDRYENDWDVVKRGWD

SEQ ID NO: 314 - protein, 176 aa, Zea mays
PEKCTIEIAPSARTSCRRCSEKITKGSVRLSAKLESEGPKGIPWYHANCFFEVSPSATVEKFSGWDTLSDEDKRTMLDLVKKDVGNNEQNKGSKRKKSENDIDSYKSARLDESTSEGTVRNKGQLVDPRGSNTSSADIQLKLKEQSDTLWKLKDGLKTHVSAAELRDMLEANGQDT

SEQ ID NO: 315 - protein, 76 aa, Solanum lycopersicum
GIANQLTNILRDVGEDARRGRVYLPQDELAQAGLSDEDIFAGRVTDKWRIFMKKQIHRARKFFDEAEKGVTELSSA

SEQ ID NO: 316 - protein, 76 aa, Zea mays
ANQLTNILRDVGEDARRGRIYLPQDELAQAGLSDEDIFKGVVTNRWRNFMKRQIKRARMFFEEAERGVNELSQASR

SEQ ID NO: 317 - protein, 76 aa, Zea mays
PMYQIIQAVLRDQPEDHTEMHLVYANRTEDDILLRDELDRWAAEYPDRLKVWYVIDQVKRPEEGWKYSVGFVTEAV

SEQ ID NO: 318 - protein, 76 aa, Solanum lycopersicum
FEEHNVLEYLILAGDHLYRMDYEKFIQAHRETDADITVAALPMDEKRATAFGLMKIDEEGRIIEFAEKPQGEQLQA

SEQ ID NO: 319 - protein, 76 aa, Zea mays
DIDSYKSARLDESTSEGTVRNKGQLVDPRGSNTSSADIQLKLKEQSDTLWKLKDGLKTHVSAAELRDMLEANGQDT

SEQ ID NO: 320 - protein, 76 aa, Zea mays
MGRTPCCEKVGLKRGRWTAEEDQLLANYIAEHGEGSWRSLPKNAGLLRCGKSCRLRWINYLRADVKRGNISKEEED

SEQ ID NO: 321 - protein, 76 aa, Zea mays
MSSEKEAALRRLDDSPTIFDKIIKKEIPSTVVYEDEKVLAFRDINPQAPTHILIIPKVKDGLTGLAKAEERHIEIL

SEQ ID NO: 322 - protein, 201 aa, Oryza sativa
MDEAWERAVEAALQAAGEGSSSPARSLTLDGAVKCLHGRLPAAEILERYQSLEHLSIAGVGVASLAGFPRLRNLTRLTLSDNRIAGGLDHLVAAGLASLRDLDLSNNRIQDVGDLSPLANLRLVSLDLYECPVTRVKDYRSKVFGMIRTLKYLDKMDADENERPESDDDDDDGDGDGDGEEEEDDDDDEDEDPGSGEVANG

SEQ ID NO: 323 - protein, 76 aa, Zea mays
ATLSGAKTGRSPRDKRVVKDEVTAQDLWWGKGSPNIEMDEKTFLINRERAVDYLNSLKVVRQRQLLNWDPENRIKV

SEQ ID NO: 324 - protein, 176 aa, Zea mays
MGISRDSMHKRRATGGKQKAWRKKRKYELGRQPANTKLSSNKTVRRVRVRGGNVKWRALRLDTGNYSWGSEAVTRKTRILDVVYNASNNELVRTQTLVKSAIVQVDAAPFKQWYLTHYGVDIGRKKKTPAAKKDNAEGQEVEAAAEETKKSNHVTRKLEKRKEGRTLDPHIEEQFG

SEQ ID NO: 325 - protein, 126 aa, Zea mays
GKVGPIGCLHSSEGTEEERNEVRGRGAGKRVESIDREKQNEIRIWPKKMQRYGYHDRTPSRKKNFSKSLRVSGAFKHPKYAGVVNDIAFLIENDDSFIKTKLFKFFFLPKKSRSDGPTSHLLKRTL

SEQ ID NO: 326 - protein, 76 aa, Zea mays
SPSAPKTKTTTNDSMDDTLMENEDDEFQNYLHELKDYDQVESNELDKYMSEPLLKHSGQFDILSWWRGRVAEYPIL

SEQ ID NO: 327 - protein, 76 aa, Solanum lycopersicum
YYQRLKHMVDDKIHSRGRGPVQILTRQPAEGRSRDGGLRFGEMERDCMIAHGAAHFLKERLFDQSDAYRVHVCERC

SEQ ID NO: 328 - protein, 76 aa, Solanum lycopersicum
MGKEKIHISIVVIGHVDSGKSTTTGHLIYKLGGIDKRVIERFEKEAAEMNKRSFKYAWVLDKLKAERERGITIDIA

SEQ ID NO: 329 - protein, 76 aa, Solanum lycopersicum
VIMNQSSIDRGFFRSLFFRSYRDEEKKMGTLVKEDFGRPDRASTMGMRHGSYDKLDDDGLAPPGTRVSGEDVIIGK

SEQ ID NO: 330 - protein, 176 aa, Zea mays
PIRESVRVSTDRDPDLEDEKREQLGESMQTELERLTWGVEVGTSEDINVDTVKRWGLQNNKYNAEHWIPPGGQRTAEDMGKLYQFWDEFIETYENEVMMNSGYREPLNKDKVFNTLLDHSNNKTNQTAEELKGIQTKIERMTMYFYEANVYESLGQLKNKFINIDEQTAKDYLLDK

SEQ ID NO: 331 - protein, 76 aa, Solanum lycopersicum
GRYEALQRSQRNLLGEDLGPLNSKELESLERQLDMSLKQIRSTRTQLMLDQLTDYQRKEHALNEANRTLKQRLMEG

SEQ ID NO: 332 - protein, 126 aa, Oryza sativa
MFDAGDRGGGGGVVAVKRMKLCEEEEEEEEGMEVDEEEEEVGWVWRPPGGLAGEDEAAAWEGRAAAIVVSDAVEVDFPVIYVNAAFEAATGYRADEVLGRNCRFLQFRDPRAQRRHPLVDPMVVSE

SEQ ID NO: 333 - protein, 76 aa, Solanum lycopersicum
GKRGATVGVTREKRIKYAKEILQKEMLPHVGVGEYCETKKAYYFGYIIHRLLLCALGRRAEDDRDHYGNKRLDLAG

SEQ ID NO: 334 - protein, 76 aa, Zea mays
ELKEMLLKKYSGCLSRLRSEFLKKRKKGKLPKDARSALMDWWNTHYRWPYPTEEDKVRLAAMTGLDPKQINNWFIN

SEQ ID NO: 335 - protein, 76 aa, Zea mays
DSMTRAKVLDIDLQKQLRPYMESMVPLPGIYDPDFIAANQGSRANSVIKGTKKEQVEQIIKDIREFKEKNKVDKIV

SEQ ID NO: 336 - protein, 76 aa, Zea mays
MSGRGKGGKGLGKGARKRHRKVLRDNIQGITKPAIRRLARRGGVKRISGLIYEETRGVRKIFLENVIRDAVTYTEH

SEQ ID NO: 337 - protein, 151 aa, Solanum lycopersicum
IGHILFMKWLGLVLVWIRQNHSIRSNKYIRSNKYLVLELRNSMARIFSILLFITCVYYLGRIPSPILTKKLKEASKTEERVESEEERDVEIETASEMKGTKQEQEGSTEEDPYPSPSLFSEEGWDPDKIDETEEIRVNGKDKIKDKFHSHL

SEQ ID NO: 338 - protein, 76 aa, Zea mays
ALRIEAARQLTGRVVTTKADKTVGVEVVRLAPHPKYKRRERIKKKYQAHDPDNQFKVGDVVELQPSRPISKTKHFL

SEQ ID NO: 339 - protein, 101 aa, Zea mays
RAGIKVCAVKAPGFGENRKANLQDLAILTGGEVITEELGMNLENFEPHMLGTCKKVTVSKDDTVILDGAGDKKSIEERAEQIRSAIENSTSDYDKEKLQER

SEQ ID NO: 340 - protein, 76 aa, Zea mays
RVSGLMLANHTSIRHLFSKCLGQYEKLRKKQAFLDNYRKFPMFADNDLSEFDESREIIESLVDEYKACESPDYIKW

SEQ ID NO: 341 - protein, 76 aa, Zea mays
DIDCLIACGELDNENAEVRKARRLKIPIVREGYIGECVKKNKMLPFDLYKLENALESSKGSTVTVKVKGRSAVHES

SEQ ID NO: 342 - protein, 276 aa, Solanum lycopersicum
HPAFTQETLSFGNLKDRLDNLLSENHQLRDLVKEKKNEVKSLLSQVSDATEKRLQHSLAEAGMLKQIGELNLAMEESLIGGSVREDVYTCFLRDLSGGARNEVEELNLGFNMINESNDTSAGSTRKIEIEDLEMECLIMQEICGVISGEGIKEAKDMLKELYLEHLNEKEIRTSLDTKLIEMENKLKFEVEEKDRLMQMEKLVNEKEKLATDASAALAKERVQSEQVRQELNAAKEFASQQQTLASGCNKEVNVIKGQLAEAVERIEVLKEEVAQL

SEQ ID NO: 343 - protein, 176 aa, Solanum lycopersicum
HNEKSNSELQRVVRIILTDADATDSSDDEGRNTVRRVKRHVTEINLMPSTKSIGDRKRRSVSPDSDVTRRKKFRGVRQRPWGRWAAEIRDPTRGKRVWLGTYDTPEEAAVVYDKAAVKLKGPDAVTNFPVSTTAEVTVTVTETETESVADGGDKSENDVALSPTSVLCDNDFAPFD

SEQ ID NO: 344 - protein, 276 aa, Zea mays
PIRESVRVSTDRDPDLEDEKREQLGESMQTELERLTWGVEVGTSEDINVDTVKRWGLQNNKYNAEHWIPPGGQRTAEDMGKLYQFWDEFIETYENEVMMNSGYREPLNKDKVFNTLLDHSNNKTNQTAEELKGIQTKIERMTMYFYEANVYESLGQLKNKFINIDEQTAKDYLLDKLEKPDDLDIVRAMGTYTLECIVVFVLSKQFNVFALDKASVQVATLVSELDSAAKIEYNRIIAEDRKRKKAKWGDKQINEDENILLQDKGVDTFNGDVHSE

SEQ ID NO: 345 - protein, 126 aa, Zea mays
MEFWGLEVKPGSTVKCEPGYGFVLHLSQAALGESKKSDNALMYVKIDDQKLAIGTLSVDKNPHIQFDLIFDKEFELSHTSKTTSVFFTGYKVEQPFEEDEMDLDSEDEDEELNVPAVKENGKADEK

SEQ ID NO: 346 - protein, 126 aa, Zea mays
MEFWGLEVKPGSTVKCEPGYGFVLHLSQAALGESKKSDNALMYVKIDDQKLAIGTLSVDKNPHIQFDLIFDKEFELSHTSKTTSVFFTGYKVEQPFEEDEMDLDSEDEDEELNVPVVKENGKADEK

SEQ ID NO: 347 - protein, 76 aa, Zea mays
HQPASAYYRARTPEFLLEVEELHKVREMITRVYALRTGKPFWVVSEDMERDVFMSADEAKAYGLVDIVGDEMIDEH

SEQ ID NO: 348 - protein, 126 aa, Zea mays
VAPGPPAPAPWMPDRAAADAAPYGFPSPSQHGGAAPPGMAVVDGQALAELAECCRELEEGRRAWAAHRREAAWRLKRVEQQLEMEREMRRREVWEEFEAKMRTMRLEQAAAAERVERDHREKVAEL

SEQ ID NO: 349 - protein, 76 aa, Solanum lycopersicum
YALPHAIPRLDLAGRDLTDHLMKILTERGYSFTTTAEREIVRDVKEKLSYIALDYEQEIETAKTSSSVEKSYELPD

SEQ ID NO: 350 - protein, 76 aa, Zea mays
QGHDDATADADRDLDLDLDVTVPSDQEVEKMEEVVRGLATLKGPTLRPRDIAEAVLFLASDEARYISGHNLVVDGG

SEQ ID NO: 351 - protein, 76 aa, Oryza sativa
VHADKSTFHRFDKFNLKYNPCGQSRLREIFLKQDNLIQGRFLAELTKEVFSDLEASKYQMAEYRISIYGRKKSEWD

SEQ ID NO: 352 - protein, 76 aa, Solanum lycopersicum
DKLEGRIKHCRLSEKANDQLRKWFEDDDALERATDAEWLLLPAGNGSSGLEAIVLSRDEDVPCTVGSISHTNIPGK

SEQ ID NO: 353 - protein, 76 aa, Zea mays
GRFGGKYVPETLMHALTELENAFHALATDDEFQKELDGILKDYVGRESPLYFAERLTEHYKRADGTGPLIYLKRED

SEQ ID NO: 354 - protein, 101 aa, Solanum lycopersicum
ITKKPTFLRLRGLFEYEIQSWKYSIPLFFTTQGFDTFRNREISTGAGAIREQLADLDLRIIIENSLVEWEELGEEGHTGNEWEDRKVGRRKDFLVRRVELA

SEQ ID NO: 355 - protein, 76 aa, Zea mays
EDNDLKNRLLNKYSGYLSSLWRELSRKKKKGKLPRDARQKLLHWWQLHYRWPYPSELEKAALAESTGLEAKQINNW

SEQ ID NO: 356 - protein, 76 aa, Oryza sativa
AELKIVDPDTGATLGRNQSGEICIRGEQIMKGYLNDPESTKNTIDKGGWLHTGDIGYVDDDDEIFIVDRLKEIIKY

SEQ ID NO: 357 - protein, 76 aa, Zea mays
DWGGRSELAIDKKERIWARVSRKQKISILVLSSAMGSNLREILDNVSYPEIFLSFPNAKEKKRIESKEKAILEFYQ

SEQ ID NO: 358 - protein, 101 aa, Zea mays
GQLCLKSEKDHGKDINLIEPYKYDEVVSLKKLHLAIIMHEYPFNIVEHEYFVEFVKSLRPHFPIKSRVTARKYIMDLYLEEKEKLYGKLKDVQSRFSTTMD

SEQ ID NO: 359 - protein, 76 aa, Zea mays
AAKALSKHDPPIVLAKVDANEEKNRPLATKYEIQGFPTIKIFRDRGKNIQEYKGPREADGIVDYLKKQVGPASKEI

SEQ ID NO: 360 - protein, 76 aa, Oryza sativa
TVETEHGESTITFFGNSFIAGPTGEIVKLANDKDEDVLVAEFDLDEIKSTRHGWGIFRDRRPDLYKVLLTLDGEKS

SEQ ID NO: 361 - protein, 76 aa, Solanum lycopersicum
VLDMTFDWTAEERDMLRNKVPKSGLKTPFRDGLLMHVAQDVVKLAKEGLERRGFKETGFLNEVAEVVKTGVTPAEK

SEQ ID NO: 362 - protein, 176 aa, Zea mays
MASAELSREENVYMAKLAEQAERYEEMVEFMEKVAKTVDSEELTVEERNLLSVAYKNVIGARRASWRIISSIEQKEEGRGNEDRVTLIKDYRGKIETELTKICDGILKLLESHLVPSSTAPESKVFYLKMKGDYYRYLAEFKTGAERKDAAENTMVAYKAAQDIALAELAPTHPIR

SEQ ID NO: 363 - protein, 176 aa, Zea mays
MASAELSREENVYMAKLAEQAERYEEMVEFMEKVAKTVDSEELTVEERNLLSVAYKNVIGARRASWRIISSIEQKEEGRGNEDRVTLIKDYRGKIETELTKICDGILKLLETHLVPSSTAPESKVFYLKMKGDYYRYLAEFKTGAERKDAAENTMVAYKAAQDIALAELAPTHPIR

SEQ ID NO: 364 - protein, 226 aa, Solanum lycopersicum
EEHLIKVELESMVMQCVIRTVQEEFEYKLWDQYAQLCGDRNEKLNAISSLRTELDAVLKSLSSSENGHVTSHGSHDADFFTRKKSSEYVTSTKSVWDGNGKLEDSKTDIPENFDAVTLKHMSKDEMVTYFNNIMTKMKRHHESILQKKTDEYFVLRAEYLNLRGGSVVPHKKDKGESDILRKKIPEIIFKLDDILVENEKHPAFTQETLSFGNLKDRLDNLLSENH

SEQ ID NO: 365 - protein, 101 aa, Solanum lycopersicum
MAASVENRQYTHLEPGLSGVGRTFKPRPDSPVRGCNFPPSSNHELPFQKKQNPPIYLDYSSSEDEDDDDEKNEYVQMIKKGKTELEPSIHDTRDEGTADNW

SEQ ID NO: 366 - protein, 101 aa, Zea mays
MSKARVYADVNVLRPKEYWDYEALTVQWGEQDDYEVVRKVGRGKYSEVFEGINVNNNEKCIIKILKPVKKKKIKREIKILQNLCGGPNIVKLLDIVRDQHS

SEQ ID NO: 367 - protein, 76 aa, Zea mays
EETLYQKTKDGKPFVDVLKEGGVLPGIKVDKGTIEVVGTDKETTTQGHDDLGKRCAKYYEAGARFAKWRAVLKIGP

SEQ ID NO: 368 - protein, 76 aa, Oryza sativa
EETLYQKTKDGKPFVDVLKEGGVLPGIKVDKGTIEVAGTEKETTTQGHDDLGKRCAKYYEAGARFAKWRAVLKIGP

SEQ ID NO: 369 - protein, 76 aa, Zea mays
AEALPLDAWVAGDDVVPVCKAILEAYRDLGSRGNRQKTRMMWLIDELGMEVFRSEVEKRMPNGVLERAAPEDLVDK

SEQ ID NO: 370 - protein, 76 aa, Zea mays
LRHCQCSNRELRLAKSTAYSFRKDNMKIQPDMEDLKIRRAQEFSYEELEQATGGFSEDSQVGKGSFSCVFKGILRD

SEQ ID NO: 371 - protein, 101 aa, Zea mays
MYISKQPFRKSKQPFRKSKQTFHKSKQPFRKFKQPFRKSKQPFRKSKQPFRRRSRIGPGDRIDYRNMSLINRFISEQGKILSRRINRLTLKQQRLITLAIK

SEQ ID NO: 372 - protein, 76 aa, Zea mays
DVGTNNEFLLNDEFYIGLRQKRATGEEYDELIEEFMSAVKQFYGEKVLIQFEDFANHNAFDLLEKYSKSHLVFNDD

SEQ ID NO: 373 - protein, 151 aa, Zea mays
ASAFIIPTSTCLVELIETPFLVVSLSEIEIVNLERVGFGTKNFDMAIVFKDFKKDVLRIDSIPSASLDAIKEWLDTTDLKYYESRLNLNWRPILKTIIDDPQKFIDDGGWEFLNMEASDSETEDTEESDQGYVPSDAEPESESEDDDSDSE

SEQ ID NO: 374 - protein, 76 aa, Solanum lycopersicum
HRARRFYENVVPSYTIYDVECPDHSFRKFTDDGLYFVSFSRNHQDLVVYRPTWLTFSCKEEDCDTHDLPLKARKFE

SEQ ID NO: 375 - protein, 276 aa, Solanum lycopersicum
ELEASKYLLSAENKEIGEKLSEIGGRLDYPHLTKDLVQDIEALWKDPAIQETLLRGNELQVPDCAHYFMENLERFSDVHYIPTKEDVLFARIRTTGVVEIQFSPVGENKKSGEVYRLFDVGGQRNERRKWIHLFEGVTAVIFCAAISEYDQTLFEDERKNRMMETKELFEWVLKQPCFEKTSFMLFLNKFDIFEQKVPKVPLNACEWFKDYQSVSTGKQEIEHAYEFVKKKFEESYFQCTAPDRVDRVFKIYRTTALDQKLVKKTFKLVDETLRRR

SEQ ID NO: 376 - protein, 76 aa, Oryza sativa
DEVYAQVSLVADNEEVERRMREGEDGAACDGEGEDAVKRPARIPHMFCKTLTASDTSTHGGFSVPRRAAEDCFPPL

SEQ ID NO: 377 - protein, 76 aa, Zea mays
FRTFTIEGSSHLIKQTEKGVDLIASLCHNYHTSEECLKEMMDKSHKAIEEVFSMKALSASECKTENLDKIDTDRLM

SEQ ID NO: 378 - protein, 101 aa, Zea mays
SAKKPTFLRLRGLFEDEISSCNHSISPFFSTPGFATFRNREIATGAGAIREQLADLDLRIIIENSLVEWKELEDEGYSGDEWEDRKRRIRKVFLIRRMQLA

SEQ ID NO: 379 - protein, 76 aa, Solanum lycopersicum
YALPHAILRLDLAGRDLTDNLMKILTERGYMFTTTAEREIVRDMKEKLAYVALDYEQEIETARSSSSIEKNYELPD

SEQ ID NO: 380 - protein, 76 aa, Solanum lycopersicum
FWFRSHTAKEIKWGGAKHHPEDKDDGQRMHPRSSFKAFLEVVKSRSSPWENAEMDAIHSLQLILRDSFKDAEASNS

SEQ ID NO: 381 - protein, 176 aa, Zea mays
HENTENSNTMIELEAEKYRLEKELKDHEWKLSVLNKKIERSNQALAKLHSSWSPSEQSADREHLTEEEKIMFRRIGRKMDGLVLLGRRGIFDGVIEEIHQHWKHKEVVKVITKQNQTRQIMYAASLLEVETGGILIAVEKLTTSHAIILYRGKNYRRPAKSSFSNLLTKREALRRS

SEQ ID NO: 382 - protein, 76 aa, Oryza sativa
MRTFTKVYKRGAVGRSIDMSQFSGYDELKHALARMFSIEGQLEERQRIGWKLVYKDHEDDILLLGDDPWEEFVGCV

SEQ ID NO: 383 - protein, 76 aa, Solanum lycopersicum
YALPHAILRLDLAGRDLTDSLMKILTERGYSFTTSAEREIVRDVKEKLAYIALDYEQELETSKTSSSVEKSYELPD

SEQ ID NO: 384 - protein, 201 aa, Zea mays
PLTVKVDHLKEKPYNKDDDVMKATSFEVISTLREVLRTSSLWKDHVQTYTQHIGDFNYQRLADFGAAISGANKLLCQEVLEELDVYKRLKLTLELVKKEMEISKLQQSIAKAIEEKISGDQRRYLLNEQLKAIKKELGLETDDKTALSAKFRERIESKKDKCPPHVLQVIEEELTKLQLLEASSSEFSVTRNYLDWLTVLP

SEQ ID NO: 385 - protein, 76 aa, Zea mays
MTEKKNSREKKNPREAKVTFEGLVTEALPNGMFRVRLENDTIILGYISGKIRSSSIRILMGDRVKIEISRYDSSKG

SEQ ID NO: 386 - protein, 176 aa, Zea mays
AMGWNIVYQFRKAQSEIDNYLRLVPLITLVDNARIRDRLEYIERDQCEYSFDEEDKKVQDALLNPDPCTNPTIVLKKTLSCSYPNLPFNEALRKESEKLQVELQRSQSNMDLGSCEVIQHLLGVTKTVESTIPEKETNVKAPEKKGSNYSESKGETAKSFDDDDDYPKKQNGDYPK

SEQ ID NO: 387 - protein, 201 aa, Solanum lycopersicum
KDAEEEVALISYSQQSDFRRGIITGSMRAQRRKTFISKLFQANVHSPLFVDRITPLRLFSFDISELIKPILKNWTDKEGEFKILESREEQTKREEKKEKDKKEDNKRKEQARIAIEEAWDTIPLAQIIRGYMLITQSILRKYILLPALIIAKNIGRMLFLQLPEWSEDLQEWNREMQIKCTYNGVQLSETEFPKNWLRDGI

SEQ ID NO: 388 - protein, 76 aa, Zea mays
LRLDLAGRDLTDHLMKILTERGYSLTTSAEREIVRDIKEKLAYVALDYEQELETAKSSSSVEKSYEMPDGQVITIG

SEQ ID NO: 389 - protein, 76 aa, Zea mays
KLETGIRRYTGDDLSSLTLDDVSDLEQQLEYSVSKVRARKHQLLNQQLDNLRRKEQILEDQNTFLYRMINENQQAA

SEQ ID NO: 390 - protein, 151 aa, Zea mays
DQMNTYSFSVDGRYIFDFSMANDQVSHRLLDTFGKKDREILDYLTPDRIVFNGHWNCFYPSILQDNSDLLAKKRRNRLVVPLQYHQEQEKERISCLGISMEIPFMGVLRRNTIFAYFDDPRYRKDKRGSGIVKFRYRTLEEEYRTQEEEYR

SEQ ID NO: 391 - protein, 76 aa, Solanum lycopersicum
HSESEWKARLLMEQSRAVKCPSISYHLAGSKKIQQELAKPNVLERFLENKDDIAKLRKCFAGLWSLDESDIVKDAI

SEQ ID NO: 392 - protein, 276 aa, Zea mays
RYSKRDDATKDLTEAVEVGDKDAIEKLSKRTVKVTRQHNEDCKRLLRLMGVPVVEAPSEAEAECAALCINDKVFAVASEDMDSLTFGAPRFLRHLMDPSSKKIPVMEFDVAKVLEELELTMDQFIDLCILCGCDYCDSIKGIGGQTALKLIRQHGSIESILENLNKDRYQIPEDWPYQEARRLFKEPNVTLDIPELKWTAPDEEGLISFLVKDNGFNEDRVTKAIEKIKSAKNKSSQGRLESFFKPTATTSAPLKRKETSDKTSKAAANKKTKAGG

SEQ ID NO: 393 - protein, 276 aa, Solanum lycopersicum
KEDLVKQHAKVAEEAIAGWEKAENEVAVLKQQLDAAVQQNLTLEVRVSHLDGALKECVRQLRQARDEQEKMIQDAMAEKNEMESEKTALEKQLLKLQTQVEAGKAEMPTSTDPDILVRLKYLEKENAALKIELVSCSEVLEIRTIERDLSTQAAETASKQQLESIKKLTKLEVECRKLQAMARKSSPFNDQRSSAVSSFYVDSVTDSQSDSGERLNTVDNDALKMSKLETREYEPSCSNSWASALIAELDQFKNEKAMPKTLAACSIEIDMMDDFL

SEQ ID NO: 394 - protein, 76 aa, Solanum lycopersicum
MAREENVYMAKLAEQAERYEEMVQFMEKVSTSLGSEELTVEERNLLSVAYKNVIGARRASWRIISSIEQKEESRGN

SEQ ID NO: 395 - protein, 251 aa, Zea mays
LHFHLHNHIMVGNKKTKDVQFYVEVMDVVQTLGGSRRSALDPDEIEEEQRERDRKNRINMDFQNFVNKVNDHWSQPQFKGLDLEFDVPLRELGFHGVPYKASAFIIPTSTCLVELIETPFLVVSLSEIEIVNLERVGFGTKNFDMAIVFKDFKKDVLRIDSIPSASLDAIKEWLDTTDLKYYESRLNLNWRPILKTIIDDPQKFIDDGGWEFLNMEASDSETEDTEESDQGYVPSDAEPESESEDDDSDSE

SEQ ID NO: 396 - protein, 76 aa, Solanum lycopersicum
QFSPVGENKKSGEVYRLFDVGGQRNERRKWIHLFEGVTAVIFCAAISEYDQTLFEDERKNRMMETKELFEWVLKQP

SEQ ID NO: 397 - protein, 101 aa, Zea mays
IGIRYDGTGRKKGVYFKVQWEGYGPEEDTWEPIDNLSDCPLKIREFVQEGRKRKILPLPGDVDVICGGPPCQGISGFNRFRNRDEPLKDEKNKQMVTFMDI

SEQ ID NO: 398 - protein, 76 aa, Oryza sativa
VDKGASKYVTRIRAQYHRCEMIQNLGDICKELIGAYEKVNKKKPDSIIYFRDGVSDGQFDMVLNEELADMENKIMV

SEQ ID NO: 399 - protein, 276 aa, Solanum lycopersicum
DVFMEHGKMGEFLDGLRSLAKDEFKKLKKSIDELRGSNSVSNKISRSEMAKLEGILQEKESGIWVQLDKTLDNIRMMVDTVFKRMDVMLQLSKTSLHHWQEEHLIKVELESMVMQCVIRTVQEEFEYKLWDQYAQLCGDRNEKLNAISSLRTELDAVLKSLSSSENGHVTSHGSHDADFFTRKKSSEYVTSTKSVWDGNGKLEDSKTDIPENFDAVTLKHMSKDEMVTYFNNIMTKMKRHHESILQKKTDEYFVLRAEYLNLRGGSVVPHKKDKGE

SEQ ID NO: 400 - protein, 76 aa, Oryza sativa
TDDTKKLSKPKRALMARSGCGKKGQPIQLLTNHFKVSLKAADEFFHHYYVNLKYEDDRPVDGKGIGRKVLDKLQQT

SEQ ID NO: 401 - protein, 76 aa, Solanum lycopersicum
GELCQEKSIFLAYEQYESKCNSSSGSDSCVVDKEDFADEEDYIKAGGSQLVFVQMQQKKDMDQQSKLSDELRQISA

SEQ ID NO: 402 - protein, 76 aa, Zea mays
MPTKNQLIRHGREEKRRTDRTRALDQCPQKQGVCLRVSTRTPKKPNSALRKIAKVRLSNRHDIFAYIPGEGHNLQE

SEQ ID NO: 403 - protein, 76 aa, Oryza sativa
VASADWPEVTKYNSVVRMQASRKEIIQDLDSIVRELLNAFKRDSKMEPKQLIFYRDGVSEGQFQQVVESEIPEIEK

SEQ ID NO: 404 - protein, 176 aa, Zea mays
YFGEYEASKARHAYGPSGHRGMSVLIFESSAVGYMEAERLHKHFVNQGTDRNSWHLRKVRFVPGGKRQLYGFLANKEDMEAFNKHCHGKSRLKYEMRSYNEMVVIQMKQMSEDNQQLNYLKNKMVKTEQRSKAVEESLGVVTQKLRETIEENIFVRSKAKEKHMEYEEEMKSQEEI

SEQ ID NO: 405 - protein, 76 aa, Zea mays
DHLTDLKEKFKRMCDKSMIRKRYMHLTEEFLSENPSMCAYMAPSLDARQDVVVTEVPKLGKAAAQEAIKEWGQPKS

SEQ ID NO: 406 - protein, 76 aa, Solanum lycopersicum
LRSRVGGLVRVERKKKRIELKIFSGDIHFPGETDKISRHTGVLIPPGTGKRNSKEYKKVQNWIYVQRITPSKKRFF

SEQ ID NO: 407 - protein, 276 aa, Oryza sativa
MATREHELRPEQERLGEDREEYEDGEEEEEEGEEGWDDWESDGDDAGGGGGGGGLLCLFCSARFDSESSLFSHCASEHRFDFYRVVKETGMDFYGCIKLINFVRSKVAENKCWSCGQVFSSNSELCGHLHALEIPQLEGKVPWGDDVYLKPFLEDDSLLHSLSVFDDDDEDDCGMPMEKGGCSAGNGSLAETCESNLKSIINDGSDVIDRFERTCTIESTDGECSGSLAQEPSDKQLKIARASAAARGIKSVDESYFGSYSSFGIHREMLGDKVRT

SEQ ID NO: 408 - protein, 101 aa, Solanum lycopersicum
RGSGNNWSTPSDPQKLARPHLYDGGFPSSAPVPPALKNGWDWSSRVASAHPKDNSQVAAAADDDKASEHDAEDNELDFLDESDDDLHSDDFDSDVGEMSYE

SEQ ID NO: 409 - protein, 76 aa, Oryza sativa
AFWELMRRKVHRYVIFKIDDRREEIVVEKTGAPWESYDDFTASLPADAVYDLDFVSDDNCRKSKIFFISWSPSLSC

SEQ ID NO: 410 - protein, 76 aa, Zea mays
DLPVDILRRSSVRGSGFVAAALVSSARKADDDARHDDDDPSGDRHETYGSHYLANLGVEQSVRDEGTVDAWVESSQ

SEQ ID NO: 411 - protein, 176 aa, Zea mays
GSGASLDRAAAAARKDRHSKICTAGGMRDRRMRLSLDVARKFFALQDMLGFDKASKTVQWLLNTSKSAIQEIMADDASSECVEDGSSSLSVDGKHNPAEQLGGGGDQKPKGNCRGEGKKPAKASKAAATPKPPRKSANNAHQVPDKETRAKARERARERTKEKHRMRWVKLASAID

SEQ ID NO: 412 - protein, 76 aa, Oryza sativa
AILRLDLAGRDLTDYLMKILTERGYSFTTTAEREIVRDMKEKLSYIALDYDQEMETAKTSSSVEKSYELPDGQVIT

SEQ ID NO: 413 - protein, 76 aa, Zea mays
MANSSSGLAVNDECKVKFRELKSRRTFRFIVFRIDDTDMEIKVDRLGEPNQGYGDFTDSLPANECRYAIYDLDFTT

SEQ ID NO: 414 - protein, 176 aa, Zea mays
KFKHEHFVEYGIFLAPKSYMLKASSVDQPIIKFKGAGKDEADEEWFINQLADPRAKKVISYVRKFSRNFRELLVQEKMCKYTMGLESKKREYVFDKNGVWVDTKPCHIGDFDVKSINPTSYWIIMNLLEENEDLRNEFSNSEIMIANWEIKADAAKKRKASKLRGKPLRGGDTPSH

SEQ ID NO: 415 - protein, 176 aa, Oryza sativa
MSQPAELSREENVYMAKLAEQAERYEEMVEFMEKVAKTVDSEELTVEERNLLSVAYKNVIGARRASWRIISSIEQKEESRGNEDRCTLIKEYRGKIETELSKICDGILKLLDSHLVPSSTAPESKVFYLKMKGDYYRYLAEFKTGAERKDAAENTMVAYKAAQDIALAELPPTHPI

SEQ ID NO: 416 - protein, 76 aa, Oryza sativa
RIRAQPHRCEVIQHLGDMCKELIGVFEKRNRVKPQRIIYFRDGVSDGQFDMVLNEELADMEKAIKTKDYSPTITVI

SEQ ID NO: 417 - protein, 126 aa, Zea mays
MATFAKPENALKRAEELIHVGQKQSALQALHDLITSKRYRSWQKPLEKIMMKYVELCVDLRKGRFAKDGLIQYRIVCQQVNVSSLEDVIKHFMQLSNEKAEQAKSQVEALEDALDVEDLEADKRPE

SEQ ID NO: 418 - protein, 151 aa, Zea mays
MAPKAEKKPAAKKPAEEEPATEKVEKAPAGKKPKAEKRLPAGKSKEGGEGKKGKKKAKKSVETYKIYIFKVLKQVHPDIGISSKAMSIMNSFINDIFEKLAAESAKLARYNKKPTITSREIQTSVRLVLPGELAKHAVSEGTKAVTKFTSS

SEQ ID NO: 419 - protein, 176 aa, Oryza sativa
MSAQAELSREENVYMAKLAEQAERYEEMVEFMEKVAKTVDSEELTVEERNLLSVAYKNVIGARRASWRIISSIEQKEESRGNEDRVTLIKDYRGKIETELTKICDGILKLLESHLVPSSTAPESKVFYLKMKGDYYRYLAEFKTGAERKDAAENTMVAYKAAQDIALAELPPTHPI

SEQ ID NO: 420 - protein, 76 aa, Solanum lycopersicum
LLFNLNTNKNVSQNKNQNFFLPSNKKIKIKNRSQEAKEPPSQRERGSDIENKGNLSPVFSKHQTDLEKDYVESDTK

SEQ ID NO: 421 - protein, 76 aa, Oryza sativa
ILRLDLAGRDLTDNLMKILTERGYSFTTTAEREIVRDIKEKLAYVALDYEQELDTARSSSSIEKSYELPDGQVITI

SEQ ID NO: 422 - protein, 76 aa, Zea mays
DLALGVNSYYVLQIIEQDDGSECYVFRKWGRVGSEKIGGQKLEEMSKTEAIKEFKRLFLEKTGNSWEAWECKTNFR

SEQ ID NO: 423 - protein, 76 aa, Oryza sativa
KRLNLLEQKFNLHLMVNADRELLAQKAAPHRDFYNVRKVDTHVHHSACMNQKHLLRFIKSKLRKEPDEVVIFRDGT

SEQ ID NO: 424 - protein, 151 aa, Zea mays
MARKGNPISVRLDLNRSSDPSRFSDYYYGKSLYQDVNLRSYFSSIRPPTRLTFGFRLGRCIILHFPKRTFIHFFLPRRPLRLKRRDKSRPGKDKGRWWAFGKVGPIGCLHSSEGTEEERNEVRGRGAGKRVESIDREKQNEIRIWPKKMQR

SEQ ID NO: 425 - protein, 176 aa, Solanum lycopersicum
IQIKILFPFCLKPWHISKLYPSRRELMKKQKQKDDFCFLTVWGMEAELPFGSPRKRPSFFEPIFKELEKKIGKFKKKYFLTLKILKGKTKLFRKVSKETTKLFIKSIGFLKKIKKELSKVNLIVLFRFKEISESNETKKEKDYLISNQIINESFRQIESGNWPNSSLIETKMKDLT

SEQ ID NO: 426 - protein, 151 aa, Oryza sativa
GGRGVEPRRGGDVLGGGQGGGRGTTAGAGGLVRGGSELAVGAELRRRVPTCHVNDFPELGIGGTPVLVRRWRPRDHRDQHDHQSQRHHHRHHHHQRQRHHHHHQRQQRRGSRTRDPRVRRGPLRIPYGEDEKEEPPATPIASSNKNKREEP

SEQ ID NO: 427 - protein, 151 aa, Zea mays
MAPKADKKPAAKKPAEEEPATEKAEKAPAGKKPKAEKRLPAGKSAGKEGGEGKKGKKKAKKSVETYKIYIFKVLKQVHPDIGISSKAMSIMNSFINDIFEKLAAESAKLARYNKKPTVTSREIQTSVRLVLPGELAKHAVSEGTKAVTKFT

SEQ ID NO: 428 - protein, 176 aa, Zea mays
KKKQLELEGIQRISARRKEQEQVRREATEDLAEDLSEGEKGDTIGELAPVETTKKKFQRNFSDLTVWSDDNKEKKLYIVLISVHGLVRGENMELGRDSDTGGQVKYVVELARAMSMMPGVYRVDLFTRQVSSPDVDWSYGEPTEMLCAGSNDGEGMGESGGAYIVRIPCGPRDKYL

SEQ ID NO: 429 - protein, 76 aa, Oryza sativa
AILRLDLAGRDLTDSLMKILTERGYSFTTSAEREIVRDIKEKLAYVALDYEQELETAKSSSSVEKSYELPDGQVIT

SEQ ID NO: 430 - protein, 101 aa, Solanum lycopersicum
SCFLNPKESTWVLPITKKCSMPESNWGSRWWRNWIGKKRDSSCKISNETVAGIEILFKEKDLKYLEFLFVYYMDDPIRKDHDWELFDRLSLRKSRNRINLN

SEQ ID NO: 431 - protein, 176 aa, Solanum lycopersicum
MADSSREENVYLAKLAEQAERYEEMIEFMEKVAKTADVEELTVEERNLLSVAYKNVIGARRASWRIISSIEQKEESRGNEDHVNTIKEYRSKIEADLSKICDGILSLLESNLIPSASTAESKVFHLKMKGDYHRYLAEFKTGTERKEAAENTLLAYKSAQDIALAELAPTHPIRLG

SEQ ID NO: 432 - protein, 76 aa, Zea mays
ATRGNPRPPSQTSRPVLAPPLANGWQWQSRPRPSGSEVKKDDAPPSGSVPEVENVDGNNTSDDDDDDDDDLSDDIS

SEQ ID NO: 433 - protein, 151 aa, Oryza sativa
MMNPDGGDGDRLEAAGAGSSSAQQGHPTMEWRFAQVFGERAAGEDVQEVDIISAIEFDKSGDHLATGDRGGRVVLFERTDARDNASRREMERQDAPITRHPEFRYKSEFQSHEPEFDYLKSLEIEEKINKIRWCQTANNSLSLLSTNDKTI

SEQ ID NO: 434 - protein, 126 aa, Zea mays
GLYRVVHGIDVFDPKFNIVSPGADMSVYYPYTETDKRLTAFHPEIEELIYSDVENSEHKFVLKDKKKPIIFSMARLDRVKNMTGLVEMYGKNARLRELANLVIVAGDHGKESKDREEQAEFKKMYS

SEQ ID NO: 435 - protein, 176 aa, Oryza sativa
KRLNLLEQKFNLHLMVNADRELLAQKAAPHRDFYNVRKVDTHVHHSACMNQKHLLRFIKSKLRKEPDEVVIFRDGTYLTLKEVFESLDLTGYDLNVDLLDVHADKSTFHRFDKFNLKYNPCGQSRLREIFLKQDNLIQGRFLAELTKEVFSDLEASKYQMAEYRISIYGRKKSEWD

SEQ ID NO: 436 - protein, 76 aa, Oryza sativa
AILRLDLAGRDLTDCLMKILTERGYSFTTTAEREIVRDIKEKLAYIALDYEQELETAKSSSSVEKSYELPDGQVIT

SEQ ID NO: 437 - protein, 151 aa, Zea mays
MAPKAEKKPAAKKVAEEEPSEKAAPAEKAPAGKKPKAEKRLPAGKSAGKEGGDKKGRKKAKKSVETYKIYIFKVLKQVHPDIGISSKAMSIMNSFINDIFEKLAAEAAKLARYNKKPTITSREIQTSVRLVLPGELAKHAVSEGTKAVTKF

SEQ ID NO: 438 - protein, 76 aa, Zea mays
ERDLVRSLIIFDESDDSAAHTINSDVGDRILHNFLISAAYHKSKFGVYREALEFIYNKIEDMQSKPTFFEKDIFVD

SEQ ID NO: 439 - protein, 126 aa, Solanum lycopersicum
EEHLIKVELESMVMQCVIRTVQEEFEYKLWDQYAQLCGDRNEKLNAISSLRTELDAVLKSLSSSENGHVTSHGSHDADFFTRKKSSEYVTSTKSVWDGNGKLEDSKTDIPENFDAVTLKHMSKDEM

SEQ ID NO: 440 - protein, 101 aa, Solanum lycopersicum
MALPENLTREQCLYLAKLAEQAERYEEMVKFMDKLVIGSGSSELTVEERNLLSVAYKNVIGSLRAAWRIVSSIEQKEEGRKNDEHVVLVKDYRSKVESELS

SEQ ID NO: 441 - protein, 76 aa, Zea mays
IRQESDRHTDVLDAITTYLGIGSYREWTEERRQEWLLSELNGKRPLFGSDLPKTEEISDVLDTFHVIAELPSDNFG

SEQ ID NO: 442 - protein, 76 aa, Solanum lycopersicum
SMLPGFSAEMMPQGREKESQAKFKRYMTMMDSMTDEELDSTNPKILTESRIMRIARGSGRLVHEVMEMLEEYKRLA

SEQ ID NO: 443 - protein, 151 aa, Zea mays
KVGAPPEVSARLTEIAQEVEARQRTALGGLAAATEPELDQFMEAYHEMLVKFREELTRPLQEAMEFMRRVESQLNSLSISGRSLRNILSSGSSEEDQEGSGGETELPEVDAHGVDQELKHHLLKKYSGYLSSLKQELSKKKKKGKLPKEAR

SEQ ID NO: 444 - protein, 76 aa, Solanum lycopersicum
WSRHDPTTLNRQGNDVGKQYRSGIYYYNDAQAQLARESLEAKQKEFMDKKIVTEILPAKRFYRAEEYHQQYLEKGG

SEQ ID NO: 445 - protein, 76 aa, Solanum lycopersicum
SDSDIIDRFGRICRNLFHYYSGSSKKKTLYRIKYILRLSCARTLARKHKSTVRTFLKRSGSELLEEFLTSEEEVLS

SEQ ID NO: 446 - protein, 76 aa, Oryza sativa
LEFGHGQLDKHENDRRVRFGPSEGIERREQRIPLQPYPTSGEVIDGQVTVEKSHSPGRHGKDGPDNKAVGTNSCKI

SEQ ID NO: 447 - protein, 76 aa, Zea mays
MWSQIPGTLMRTSSLPAVIEASGNDDWKKRKEAQSLKRLEVKKKRIERRNSLTCNTSKEAAGQSPEEMNANTDKLV

SEQ ID NO: 448 - protein, 76 aa, Zea mays
GGETELPEVDAHGVDQELKHHLLKKYSGYLSSLKQELSKKKKKGKLPKEARQQLLSWWDQHYKWPYPSETQKVALA

SEQ ID NO: 449 - protein, 101 aa, Zea mays
AIVQVDAAPFKQWYLTHYGVDIGRKKKTPAAKKDNAEGQEVEAAAEETKKSNHVTRKLEKRKEGRTLDPHIEEQFGSGRLLACISSRPGQCGRADGYILEG

SEQ ID NO: 450 - protein, 176 aa, Zea mays
MAALGPKMERLSSIDAQLRMLVPGKVSEDDKLIEYDALLLDRFLDILQDLHGDDLKEMVQECYEVAAEYETKHDLQKLDELGKMITSLDPGDSIVIAKSLSHMLNLANLAEEVQIAYRRRIKLKKGDFADENSAITESDIEETLKRLVVDLKKSPAEVFDALKSQTVDLVLTAHPT

SEQ ID NO: 451 - protein, 276 aa, Solanum lycopersicum
MKEGKRKSSRLQSEAAGAGSSRKLDLDGVAAERQERNGYPEDAGSKCEEEPVAGEGEGEGEEKDEAPEVVRVEKGDGDGVAKKVKPKLAEGFYEIETVRRRRTVKGKVYYLIKWRGWPESANTWEPETNLSSCTDIIDAYEESLKSGKLRRRKRKFGATQTHPMIKQQRRFSAPVATYNGPAVKVRIIEEPTPSPPLNVLKATDLVDSNGSELNSKVDEVVNGNGLRLREQNELNLKLSELKGATSTNGNPVDISGNGLTNGFPKVNGAEFYQSDR

SEQ ID NO: 452 - protein, 176 aa, Zea mays
EQAKSQVEALEDALDVEDLEADKRPEDLMLSFVSGEKGKDRSDKEVVTPWFKFLWETYRTVLEILRNNSKLEALYAMTAHRAFQFCKQYKRTTEFRSCVRSIRNHLANLNKYRDQRDRPDLTAPESLQLYLDTRVEQLKVATELSLWQEAFRSVEDIHGLMTMVKKMPKPSILVVY

SEQ ID NO: 453 - protein, 76 aa, Zea mays
KFKHEHFVEYGIFLAPKSYMLKASSVDQPIIKFKGAGKDEADEEWFINQLADPRAKKVISYVRKFSRNFRELLVQE

SEQ ID NO: 454 - protein, 76 aa, Solanum lycopersicum
ASPPTEDAVVAAEPLTKEDLVGYLASGCKSKEKWRIGTEHEKFGFEFGTLRPMKYDQIADLLNGIAERFDWEKVME

SEQ ID NO: 455 - protein, 226 aa, Zea mays
MATFAKPENALKRAEELIHVGQKQSALQALHDLITSKRYRSWQKPLEKIMMKYVELCVDLRKGRFAKDGLIQYRIVCQQVNVSSLEDVIKHFMQLSNEKAEQAKSQVEALEDALDVEDLEADKRPEDLMLSFVSGEKGKDRSDKEVVTPWFKFLWETYRTVLEILRNNSKLEALYAMTAHRAFQFCKQYKRTTEFRSCVRSIRNHLANLNKYRDQRDRPDLTAPES

SEQ ID NO: 456 - protein, 76 aa, Solanum lycopersicum
IQIKILFPFCLKPWHISKLYPSRRELMKKQKQKDDFCFLTVWGMEAELPFGSPRKRPSFFEPIFKELEKKIGKFKK

SEQ ID NO: 457 - protein, 276 aa, Zea mays
HSVNIPLKSLILVQNDQYVESEQVIAEIRAGTSTLHFKEKVQKHIYSESDGEMHWSTDVYHAPEYQYGNLRRLPKTSHLWILSVSMCRSSIASFSLHKDQDQMNTYSFSVDGRYIFDFSMANDQVSHRLLDTFGKKDREILDYLTPDRIVFNGHWNCFYPSILQDNSDLLAKKRRNRLVVPLQYHQEQEKERISCLGISMEIPFMGVLRRNTIFAYFDDPRYRKDKRGSGIVKFRYRTLEEEYRTQEEEYRTREEEYRTREEDSEDEYESPENKYR

SEQ ID NO: 458 - protein, 76 aa, Zea mays
EHLTDLKEKFKRMCDKSMIRKRYMHLTEEFLAENPSMCAYMAPSLDARQDVVVVEVPKLGKAAAQKAIKEWGQPKS

SEQ ID NO: 459 - protein, 101 aa, Zea mays
EICKVRCRGVPTVDMKNLCYHLEEKSGGKVIHRVGGVVFLYRGRHYDPKTRPRYPLMLWKPATPVYPKLIKEAPDGFTKEEADEMRRKGRDLLPICKLAKN

SEQ ID NO: 460 - protein, 201 aa, Zea mays
KEFSLKYQKEVDRFFFILQELHILPRSSSLKVLDNSIIGVDTQLTKNTRSRLGGLVRVKRKKSHTELKIFSGDIHFPEEADKILGGSLIPPEREKKDSKESKKRKNWVYVQRKKFLKSKEKYFVSVRPAVAYEMDEGINLATLFPQDLLQEEDNLQLRLVNFISHENSKLTQRIYHTNSQFVRTCLVVNWEQEEKEGARAS

SEQ ID NO: 461 - protein, 76 aa, Oryza sativa
AAPLLQRMRTFTKVYKRGAVGRSIDIGRYSGYEELKHALARMFGIEGQLEDRQRIGWKLVYKDHEDDILLLGDDPW

SEQ ID NO: 462 - protein, 276 aa, Zea mays
MAALGPKMERLSSIDAQLRMLVPGKVSEDDKLIEYDALLLDRFLDILQDLHGDDLKEMVQECYEVAAEYETKHDLQKLDELGKMITSLDPGDSIVIAKSLSHMLNLANLAEEVQIAYRRRIKLKKGDFADENSAITESDIEETLKRLVVDLKKSPAEVFDALKSQTVDLVLTAHPTQSVRRSLLQKHSRIRNCLVQLYSKDITPDDKQELDEALQREIQAAFRTDEIRRTQPTPQDEMRAGMSYFHETIWKGVPKFLRRVDTALKNIGINERVPYN

SEQ ID NO: 463 - protein, 76 aa, Solanum lycopersicum
PELDQFMEAYYDMLVKYREELTRPLQEAMEFMQKIEAQLNMLGNAPVRIFNSEDKCEGVGSSEEDQDNSGGETELP

SEQ ID NO: 464 - protein, 76 aa, Solanum lycopersicum
TPSNCVDQSTYPDYYFRITNSEHKTELKEKFKRMCDKSMIKKRYMHLTEEILKENPNMCAYMAPSLDARQDIVVVE

SEQ ID NO: 465 - protein, 76 aa, Solanum lycopersicum
AHIGHYDEVWRRRAEEAKEYARNIYEPHPENVTLAFNQKLRDTMKELKKVKGTHNNSTRRGLGTKKYTGPCMVTNP

SEQ ID NO: 466 - protein, 76 aa, Oryza sativa
LTGRSDETVAMIEAYLRANKMFVDYNEPQTERVYSSYLELDLNEVEPCISGPKRPHDRVLLKEMKSDWHSCLDNRV

SEQ ID NO: 467 - protein, 76 aa, Solanum lycopersicum
HDREWILKSTTGEILTQKKVPEMCYISTLIDLNLGKLFVESPRCKEKLQIELKSSSLVTERDEMDIQNHRYEVTSY

SEQ ID NO: 468 - protein, 126 aa, Solanum lycopersicum
MQEQATSSIAASSLPSSSERSSSSALHHELKEGMESDDEIRRVPEMGGEATGTTSASGRDGVSAAGQAQPSAGTQRKRGRSPADKENKRLKRLLRNRVSAQQARERKKAYLIDLEARVKELETKNA

SEQ ID NO: 469 - protein, 76 aa, Solanum lycopersicum
MENFPIINLEKLNGDERANTMEMIKDACENWGFFELVNHGIPHEVMDTVEKMTKGHYKKCMEQRFKELVASKGLEA

SEQ ID NO: 470 - protein, 276 aa, Solanum lycopersicum
VDSVTDSQSDSGERLNTVDNDALKMSKLETREYEPSCSNSWASALIAELDQFKNEKAMPKTLAACSIEIDMMDDFLEMEQLAALSETANKTPSVTSDAVPHDSPNIENPLAAEYNSISQRVVELEQKLEKIEAEKAELENAFNESQDALKVSSLQLKETQTRLEGLQKELDVVNESKELLEFQLYGMEVEARTMSVNIDSLKTEVEKEKSLSSEMEAKCHELENDLRKKSQEAEAQQTSGSNSELKIKQEDLAVAADKLAECQKTIASLGKQLQSL

SEQ ID NO: 471 - protein, 101 aa, Oryza sativa
ADDVESEVPANKPAKPKRFPMARPGLGRKGQPIQLLANHYKVSVKSSEEYFFHYNVILKYEDDRPVDGKGVGRKVIDKLQQTYRSELSSKDFAYDGEKSLF

SEQ ID NO: 472 - protein, 76 aa, Solanum lycopersicum
ELEASKYLLSAENKEIGEKLSEIGGRLDYPHLTKDLVQDIEALWKDPAIQETLLRGNELQVPDCAHYFMENLERFS

SEQ ID NO: 473 - protein, 176 aa, Oryza sativa
HHHQRQQRRGSRTRDPRVRRGPLRIPYGEDEKEEPPATPIASSNKNKREEPPTKHRPMARPPGGGGPLSKGEVKLLVNHFSVDYPKESTFFHYEIRIKLGDGPNRKLSKAELLTVKNELFEHESLQELSSAVAYDGERNLYTCAELPEDCIVPVSKFRVKDSSRTYIVSVKLKKPL

SEQ ID NO: 474 - protein, 76 aa, Oryza sativa
ADMAFRCIQEMDIDNRMTLYQHIVLSGGSTMYPGLPSRLEKEMLDRYLDVVLKGNKDGLKKLRLRIEDPPRRKHMV

SEQ ID NO: 475 - protein, 76 aa, Solanum lycopersicum
KLFIKSIGFLKKIKKELSKVNLIVLFRFKEISESNETKKEKDYLISNQIINESFRQIESGNWPNSSLIETKMKDLT

SEQ ID NO: 476 - protein, 101 aa, Zea mays
GKEVLSGVVFQPFEEIKGELALVPQSPDKSLARHKFVDDCEAALNEQINVEYNASYAYHSLFAYFDRDNVALKGFAKFFKESSDEEREHAEKLMEYQNKRG

SEQ ID NO: 477 - protein, 76 aa, Zea mays
RGHMTERAELLKEEVRKTLKAAANQIKNALDLIITLQRLGLDHHYENEISELLRFVYSSSDYDDKDLYVVSLRFYL

SEQ ID NO: 478 - protein, 76 aa, Zea mays; identical to SEQ ID NO: 477

SEQ ID NO: 479 - protein, 151 aa, Zea mays
KTKYQLAHISAGDLLRAEIAAGSENGKRAKEFMEKGQLVPDEIVVNMVKERLRQPDAQENGWLLDGYPRSYSQAMALETLEIRPDTFILLDVPDELLVERVVGRRLDPVTGKIYHLKYSPPENEEIASRLTQRFDDTEEKVKLRLETYYQN

SEQ ID NO: 480 - protein, 76 aa, Solanum lycopersicum
MENFPIINLENLNGDERAKTMEMIKDACENWGFFELVNHGIPHEVMDTVEKLTKGHYKKCMEQRFKELVASKGLEA

SEQ ID NO: 481 - protein, 176 aa, Zea mays
LLFIVLDQMDPEIDRQISEHVARMHRYCTDDGGARSLDKEGYAEEDDGDANAAIFVKYDRMLHGQDRRRGKKSKQDRLTVKFLKKYIHYAKNLIQPRLTDEASDHIATSYAELRDGSANAKSGGGTLPITARTLESIIRLSTAHAKMKLRHEVLKSDVEAALQVLNFAIYHKELTE

SEQ ID NO: 482 - protein, 176 aa, Zea mays
LLFIVLDQMDPEIDRQISEHVARMHRYCTDDGGARSLDKEGYAEEDDGDANAAIFVKYDRMLHGQDRRRGKKSKQDRLTVKFLKKYIHYAKNLIQPRLTDEASDHIATSYAELRDGSANAKSGGGTLPITARTLETIIRLSTAHAKMKLRHEVLKSDVEAALQVLNFAIYHKELTE

SEQ ID NO: 483 - protein, 176 aa, Zea mays; identical to SEQ ID NO: 482

SEQ ID NO: 484 - protein, 76 aa, Zea mays
KTRRNKKGSTRKVPIEIGSKQGRALAIRWLLEASQKRPGRNMAFKLSSELVDAAKGSGGAIRKKEATHRMAEANRA

SEQ ID NO: 485 - protein, 76 aa, Solanum lycopersicum
LLSPSSLSFSRCGGLRLCRCAAVKTGSEGGGIRSDNAELLRKPVISTELETTSESEELVKEESDDEVGKKSGDGEG

SEQ ID NO: 486 - protein, 76 aa, Oryza sativa
PEFRYKSEFQSHEPEFDYLKSLEIEEKINKIRWCQTANNSLSLLSTNDKTIKYWKVQEKKVKQVSVMNLDSRSVGT

SEQ ID NO: 487 - protein, 76 aa, Solanum lycopersicum
NSFIDPQAEDRELKGQLLRKYSGYLGSLKQEFMKKRKKGKLPKEARQQLVDWWLRHIKWPYPSESQKLALAESTGL

SEQ ID NO: 488 - protein, 226 aa, Solanum lycopersicum
TRFCNDDTKKEYVPKMYDPLLNGLYRGTIKKGVSSSIINNTLLENWEKRVRLNRIHTIFLPNIDYQEFEQKAYTIDKKPLSTEIDEFLTLINELGNEAKSSLNLKGLSLFSDQEQRRANSEKRTKFVKFVFNALDPNETKSGKKSIGIKEISKKVPRWSHKLITELDQQMGEFKDRASMDHQLRSRKAKRVVIFTDNKATKDAEEEVALISYSQQSDFRRGIITGS

SEQ ID NO: 489 - protein, 76 aa, Zea mays
LLRAEGFEHYRCDRNLSMGMNLNNMAKMLRCAGNDDIITIKADDGSDTVTFMFESPKQDKIADFEMKLMDIDSEHL

SEQ ID NO: 490 - protein, 176 aa, Zea mays
SGYREPLNKDKVFNTLLDHSNNKTNQTAEELKGIQTKIERMTMYFYEANVYESLGQLKNKFINIDEQTAKDYLLDKLEKPDDLDIVRAMGTYTLECIVVFVLSKQFNVFALDKASVQVATLVSELDSAAKIEYNRIIAEDRKRKKAKWGDKQINEDENILLQDKGVDTFNGDVHSE

SEQ ID NO: 491 - protein, 76 aa, Solanum lycopersicum
LVRDAFQLAKEKSPCIIFIDEIDAIGTKRFDSEVSGDREVQRTMLELLNQLDGFSSDDRIKVIAATNRADILDPAL

SEQ ID NO: 492 - protein, 76 aa, Zea mays
WPIVNSTLKLRNFRSDFDYLAQNVYKEDGGVYDEDYVQKRIELADSVEEMGEKLSATLHASGRDDMSILAMQRLNE

SEQ ID NO: 493 - protein, 76 aa, Zea mays
PEIEELLYSQTENTEHKFVLNDRNKPIIFSMARLDRVKNLTGLVELYGRNKRLQELVNLVVVCGDHGNPSKDKEEQ

SEQ ID NO: 494 - protein, 276 aa, Zea mays
CYGCGNPETEILISKTQMISLKCAACGFVSDVDMRDKLTTFILKNPPEQKKGGKDKKAMRRAEKERLKEGEAADEEQKKLKKDAKKKGSKDSTAKGLKKKATTATGSDEDHSSSPTRSHDGDKAAADDDDDDVQWQTDTSIEAAKQRMQEQLSAATAEMVMLSTEETEKKMKQPTHKDGSTNGSAKEIPNDKPAVTKPSPYEELIGDIKASLGSAPTPSQLKAVLASSTLPPQDVMNAPLEALFGGVGKGFTKEVVKNKKYLAVAVPDEGAQTLLV

SEQ ID NO: 495 - protein, 76 aa, Oryza sativa
QGTAEFVVRREEVEGSPPLAPGTRVRLLMNPDDARRRSQPPVYGTVRDVHCRSEWRMLEVDWDRDSPLAPTMNRRV

SEQ ID NO: 496 - protein, 151 aa, Oryza sativa
MEILGFTVMGGGGSPAWIEVPEKSKSAFWELKRRKVHRYVIFKIDDRREEIVVEKTGAPGESYDDFTASLPADDCRYAVYDLDFVSDDNCRKSKIFFISWSPSVSRIRAKTIYAVSRNQFRHELDGVHFEIQATDPDDMDLEVLRGRANRT

SEQ ID NO: 497 - protein, 76 aa, Oryza sativa
NGDLEGSEVQPVIDSISESKLNATSRDPRNTDSYTSRSTSEQNSKGEPRGKTRRSKKGLPHKTVSEKSDLSSAPSW

SEQ ID NO: 498 - protein, 76 aa, Zea mays
FSDVVAEAKKAGYTEPDPRDDLSGTDVARKVIILARESGLGLELSDIPVRSLVPEALKSCTSADEYMQKLPSFDED

SEQ ID NO: 499 - protein, 76 aa, Zea mays
WKEADFIKVSDDEVAFLTRGDANDEKNVLSLWFDGLKLLVVTDGDKGCRYFTKDFKGSVPGFKVDTVDTTGAGDAF

SEQ ID NO: 500 - protein, 176 aa, Zea mays
VLSKQFNVFALDKASVQVATLVSELDSAAKIEYNRIIAEDRKRKKAKWGDKQINEDENILLQDKGVDTFNGDVHSELDRKKKSISKQTNRKRVRISKHKEPGIGEALFGWLASRKLIEVKKPVFLFDKKNKKPKNVIYPGYVDCLFDIKDLPFCSTLPMVYPPADWELWPTATAEV

SEQ ID NO: 501 - protein, 76 aa, Solanum lycopersicum
PDNLKPGDLVGVNKDSYLILDTLPSEYDSRVKAMEVDEKPTEDYHDIGGLEKQIQELVEAIVLPMTHQERFQKLGV

SEQ ID NO: 502 - protein, 176 aa, Zea mays
RYSKRDDATKDLTEAVEVGDKDAIEKLSKRTVKVTRQHNEDCKRLLRLMGVPVVEAPSEAEAECAALCINDKVFAVASEDMDSLTFGAPRFLRHLMDPSSKKIPVMEFDVAKVLEELELTMDQFIDLCILCGCDYCDSIKGIGGQTALKLIRQHGSIESILENLNKDRYQIPEDWP

SEQ ID NO: 503 - protein, 126 aa, Zea mays
SILHMLNLANLAEEVQIAHRRRNSKLKKGGFADEGSATTESDIEETLKRLVSEVGKSPEEVFEALKNQTVDLVFTAHPTQSARRSLLQKNARIRNCLTQLNAKDITDDDKQELDEALQREIQAAFR

SEQ ID NO: 504 - protein, 76 aa, Solanum lycopersicum
QTRGDFIVVGDLMKSISLLIFKHEEGAIEERARDYNANWMSAVEILDDDIYLGAENNFNLFTVRKNSEGATDEERS

SEQ ID NO: 505 - protein, 76 aa, Oryza sativa
RSVAPPSRRPSPSPSRARPAAADNDGGSDSCRVRVAVRLRPKNSEDLAHGADFDSCVELQPECKKLKLKKNNWSCE

SEQ ID NO: 506 - protein, 76 aa, Zea mays
VVAEAREAGYTEPDPRDDLSGTDVARKVVVLARESGLRLELSDIPVKSLVPETLASCSSADEFMQKLPSFDEDWAR

SEQ ID NO: 507 - protein, 101 aa, Zea mays
HNNHYDGAMNFMHRDEEVDYYPSRHAPLRQAAPPTPLPPRPVAGRREKATIRKPNDFKQPGERYRSWDADRQDRFVRRFADSLGHPKVSQELRSIWIDLLA

SEQ ID NO: 508 - protein, 101 aa, Solanum lycopersicum
WIVPAYTMPPDAEHIAVLRVVIREDFSHSLAERLVSDIEKILSELDTQPPRLPTKAVRVTAEEVRDDKGDGLHHFHMDTVETQKDIIKHWRKIAGKKTSGV

SEQ ID NO: 509 - protein, 276 aa, Zea mays
LFLLPKSNNPHTFVVITLDPPIRKGQTLYPHIVIQFETEAVVERDLALSKELLVEKYKDRLEESYKGLIHEVFTKVLRGLSGAKVTRPGSFRSCQDGYAVKSSLKAEDGLLYPLEKGFFFLPKPPTLILHEEIEFVEFERHGAGGASISSHYFDLLVKLKNDQEHLFRNIQRNEYHNLFNFINGKNIKIMNLGGDGQGASGVVTDVLRDTDDDAVDPHLERIKNQAGDEESDEEDEDFVADKDDSGSPTDDSGDEESDASDSGGEKEKSSKKEASS

SEQ ID NO: 510 - protein, 101 aa, Zea mays
LGGGGDQKPKGNCRGEGKKPAKASKAAATPKPPRKSANNAHQVPDKETRAKARERARERTKEKHRMRWVKLASAIDVEAAAASGPSDRPSSNNLSHHSSLS

SEQ ID NO: 511 - protein, 76 aa, Solanum lycopersicum
RYREQRYVDKKNFDEFILQPQTQRINTEKTHFGLLVPENILWSRRRRELRIRSFFNSWNWNVVDRNSVFCNETNVK

SEQ ID NO: 512 - protein, 76 aa, Solanum lycopersicum
MAREKIQIKKIDNSTARQVTFSKRRRGLFKKAEELSVLCDADVALIIFSSTGKLFDYSSSSMKQILERRDLHSKNL

SEQ ID NO: 513 - protein, 176 aa, Oryza sativa
MSREENVYMAKLAEQAERYEEMVEYMEKVAKTVDVEELTVEERNLLSVAYKNVIGARRASWRIVSSIEQKEEGRGNEEHVTLIKEYRGKIEAELSKICDGILKLLDSHLVPSSTAAESKVFYLKMKGDYHRYLAEFKTGAERKEAAESTMVAYKAAQDIALADLAPTHPIRLGLAL

SEQ ID NO: 514 - protein, 251 aa, Oryza sativa
SIVHGSFEVRIVDAKDVSSYFLKGEPVLGACCRTNVGGFHITDFLRQLLSLKYPYHSASITWEKAEELKKEHCYVALDYMSELQIFKNNKEEAEEKTRYWQLPWVPPPVEEPPSEEELARKAALKEKAGQRLRDMAAAKRSQKIAELEKQLSYLEELMEQLDGAEEEEATAILGRSGYLSQQEIKSAILKATQSLRKAKGESNGNEEKADASGVDKYPLVSVPDETLTPEQLKEKKKQILLKTTTEGRMRA

SEQ ID NO: 515 - protein, 76 aa, Oryza sativa
MANSASGLAVNDECKFKFQELKTRRGFRFIVFKIDDKAMEIKVERLGQTAEGYEDFAATLPADECRYAVYDLDFVT

SEQ ID NO: 516 - protein, 76 aa, Zea mays
SGLMLANHTSIRHLFSKCLGQYEKLRKKQAFLDNYRKFPMFADNDLSEFDESREIIESLVDEYKACESPDYIKWGM

SEQ ID NO: 517 - protein, 101 aa, Solanum lycopersicum
PQGHRGMSLLIFEASAVGYIEADRLSEHFSENGRNRDAWERRSARFYPGGKRLLYGYMADKKDIDNFNQHSAGKSKLKFEMRSYKEAVWNPAKQMREDNQQ

SEQ ID NO: 518 - protein, 76 aa, Zea mays
SLSEQDFRKHMPRFQPENLDKNAQIFERVRRDGSTERMHAITARVGLGSPPRKRRLPHTWHNKNRQLQPERGGTVC

SEQ ID NO: 519 - protein, 76 aa, Solanum lycopersicum
MVKNSVISVISQEEKKGSVEFQVFNFTNKIRRLTSHLELHKKDYLSQRGLKKILGKRQRLLAYLAKKNRVRYKELI

SEQ ID NO: 520 - protein, 101 aa, Oryza sativa
INDTPFLNRNSRSAAGPAHQRMRTYTKVHKRGAVGRSIDINRYSGYDELKHDVARMFGIEGQLGDQNRVGWKLVYEDHEKDVLLVGDDPWEDFVKCVRCIR

SEQ ID NO: 521 - protein, 276 aa, Solanum lycopersicum
ENENLGDEILEDFETYWEDVNDRLMVSRMVSDSVIKGIVSAVEQEAAERLVTKDMELANLKEYLQFHEGGLSKTELESFGSLMSQNELESMDFRKCMTLSDVFMEHGKMGEFLDGLRSLAKDEFKKLKKSIDELRGSNSVSNKISRSEMAKLEGILQEKESGIWVQLDKTLDNIRMMVDTVFKRMDVMLQLSKTSLHHWQEEHLIKVELESMVMQCVIRTVQEEFEYKLWDQYAQLCGDRNEKLNAISSLRTELDAVLKSLSSSENGHVTSHGSHD

SEQ ID NO: 522 - protein, 101 aa, Zea mays
PLTVKVDHLKEKPYNKDDDVMKATSFEVISTLREVLRTSSLWKDHVQTYTQHIGDFNYQRLADFGAAISGANKLLCQEVLEELDVYKRLKLTLELVKKEME

SEQ ID NO: 523 - protein, 101 aa, Zea mays
SEDQADEDSPLDKDEFVVEKLVGICYGGSDRENGIYFKVQWEGYGPEEDTWEPIDNLSDCPQKIREFVQEGHKRKILPLPGDVDVICGGPPCQGISGFNRY

SEQ ID NO: 524 - protein, 201 aa, Zea mays
MALQNIGASNRDDAFYRYKMPRMITKIEGRGNGIKTNVVNMVDIAKALARPASYTTKYFGCELGAQSKFDEKTGISLVNGAHDTAKLAGLLEVFIKKYVQCYGCGNPETEILISKTQMISLKCAACGFVSDVDMRDKLTTFILKNPPEQKKGGKDKKAMRRAEKERLKEGEAADEEQKKLKKDAKKKGSKDSTAKGLKKKA

SEQ ID NO: 525 - protein, 176 aa, Solanum lycopersicum
ELEASKYLLSAENKEIGEKLSEIGGRLDYPHLTKDLVQDIEALWKDPAIQETLLRGNELQVPDCAHYFMENLERFSDVHYIPTKEDVLFARIRTTGVVEIQFSPVGENKKSGEVYRLFDVGGQRNERRKWIHLFEGVTAVIFCAAISEYDQTLFEDERKNRMMETKELFEWVLKQP

SEQ ID NO: 526 - protein, 76 aa, Zea mays
RLKYALTYREVISILMQRHVLVDGKVRTDKTYPAGFMDVISIPKTNENYRLLYDTKGRFRLHPIRDEDAKFKLCKV

SEQ ID NO: 527 - protein, 226 aa, Solanum lycopersicum
SCPRNTQICRKKRPVMASMHSENQKESNVCNRRSILFVGFSVLPLLNLRARALEGLSTDSQAQPQKEETEQTIQGSAGNPFVSLLNGLGVVGSGVLGSLYALARNEKAVSDATIESMKNKLKDKEDAFVSMKKQFESELLSEREDRNKLIRREGEERQALVNQLKSAKTTVISLGQELQNEKKLAEDLKFEIKGLQNDLMNTKEDKKKLQEELKEKLDLIQVLEEK

SEQ ID NO: 528 - protein, 76 aa, Zea mays
SSEQKVYDVVLKQAALLKRQLRTPVLDARPQDMDMPRNGLKEAYDRCGEICEEYAKTFYLGTMLMTEERRRAIWAI

SEQ ID NO: 529 - protein, 151 aa, Oryza sativa
KLVVVDLAGSERIDKSGSEGHTLEEAKSINLSLSALGKCINALAENSPHVPVRDSKLTRLLKDSFGGTARTSLVVTIGPSPRHRGETTSTIMFGQRAMKVENMVKLKEEFDYKSLCRRLDIELDKLIAENERQRKYFDDEIERITAEAQLR

SEQ ID NO: 530 - protein, 76 aa, Oryza sativa
DEVYAQLSLVPEKEEVARRADDGEGEDGDGMKQRFARMPHMFCKTLTASDTSTHGGFSVPRRAAEDCFPPLDYSQQ

SEQ ID NO: 531 - protein, 201 aa, Zea mays
EEKARRRGVRLHTPLGQETPQTVSAHGIMMEVRERRKMDLARVSPGDGRSREEVLGEPLTPSEVRALVKPHISHNRQLNIGRDGLTHNMLEMIHCHWRRQEICKVRCRGVPTVDMKNLCYHLEEKSGGKVIHRVGGVVFLYRGRHYDPKTRPRYPLMLWKPATPVYPKLIKEAPDGFTKEEADEMRRKGRDLLPICKLAKN

SEQ ID NO: 532 - protein, 76 aa, Solanum lycopersicum
YSAGLDPIFYCHHANVDRMWNEWKLIGGKRRDLTDKDWLNSEFFFYDENRNPYRVKVRDCLDSKKMGFDYAPMPTP

SEQ ID NO: 533 - protein, 76 aa, Zea mays
SDKRQGAKADKNLRFLLQKVLKQSDVGSLGRIVLPKKEAEVHLPELKTRDGISIPMEDIGTSRVWNMRYRFWPNNK

SEQ ID NO: 534 - protein, 76 aa, Oryza sativa
KNPHEIDWGKAKCALKNLRIKTTHTGSEFRIIGLSEDTCYSQTFQIKRKNGNGGSDTVEEVTVFEYYRKNWKIDLK

SEQ ID NO: 535 - protein, 151 aa, Zea mays
MAGNEWINGYLEAILDSHTSSRGAGGGGGGGDPRSPTKAASPRGAHMNFNPSHYFVEEVVKGVDESDLHRTWIKVVATRNARERSTRLENMCWRIWHLARKKKQLELEGIQRISARRKEQEQVRREATEDLAEDLSEGEKGDTIGELAPVE

SEQ ID NO: 536 - protein, 76 aa, Zea mays
SGLMLANHTSIRHLFGKCLGQYEKLRKKQAFLDNYRKFPMFADNDLSEFDESREIIESLVDEYKACESPDYIKWGM

SEQ ID NO: 537 - protein, 176 aa, Zea mays
DSPKPAPARKNTKTAAKPLTAGVPGGRTHRAVLGIIRRVRSLELSDAPSPNSVHTSNSGAAAAAFHLTIELSPPREPGQYVVEKEKSRAVPWAAARDEGLKVALRREKKPREPTRAETELETHELRRLRRLARGIGRWARAKKAGVTDEVVKEVRREWASGEELAAVRIVEPLRRS

SEQ ID NO: 538 - protein, 76 aa, Zea mays
MWSPIPGTLMRTSSLPAVIEASGNDDWKKRKEAQSLKRLEVKKKRIERRNSLACNTSKEAAGQSPKEMNANTDKLV

SEQ ID NO: 539 - protein, 76 aa, Zea mays; identical to SEQ ID NO: 538

SEQ ID NO: 540 - protein, 76 aa, Zea mays
ALQGGVREKVELATKFGVSFADGKREIHGDPAYVRTACEGSFKRLGVDCIDLYYQHRIDKRVPIEVTIGELKKLVE

SEQ ID NO: 541 - protein, 76 aa, Solanum lycopersicum
KKMNLAEYEKQRKLNEWMNHSSYEKCLSHEQAREVAERLGLPNLFWDWDLPRTREGFYRFQGSVEAAIVRGWAFAE

SEQ ID NO: 542 - protein, 76 aa, Zea mays
NYSTESMRKEGGYEVIKAAIEKLKLRHREHIAAYGEGNDGRLTGRHETADINTFSWGVANRGASVRVGRETEQNGK

SEQ ID NO: 543 - protein, 76 aa, Solanum lycopersicum
MENFPIINLEKLNGAERVATMEKINDACENWGFFELVNHGIPHEVMDTVEKLTKGHYKKCMEQRFKELVAKKGLEG

SEQ ID NO: 544 - protein, 76 aa, Oryza sativa
MESYLEENFGGVKAKNSSEEALRRWRKLCGVVKNPKRRFRFTANLDKRGEAQAIKHANHEKLRVAVLVSKAALQFI

SEQ ID NO: 545 - protein, 76 aa, Solanum lycopersicum
SQLPDLDDVYREVMRDFRKRLEKLAEELLDLLCENLGLEKSYLKNTFYGSKGPNFGTKVSNYPPCPKPDLIKGLRA

SEQ ID NO: 546 - protein, 101 aa, Zea mays
LRPIVYRSGDKVVTSDINELYKRVIRRNNNLAYLLKRSELAPADLVMCQEKLVQEAVDTLLDSGSRGQPTRDGHNKVYKSLSDVIEGKEGRFRETLLGKRV

SEQ ID NO: 547 - protein, 176 aa, Zea mays
SHMLNLANLAEEVQIAYRRRIKLKKGDFADENSAITESDIEETLKRLVVDLKKSPAEVFDALKSQTVDLVLTAHPTQSVRRSLLQKHSRIRNCLVQLYSKDITPDDKQELDEALQREIQAAFRTDEIRRTQPTPQDEMRAGMSYFHETIWKGVPKFLRRVDTALKNIGINERVPYN

SEQ ID NO: 548 - protein, 176 aa, Solanum lycopersicum
HPAFTQETLSFGNLKDRLDNLLSENHQLRDLVKEKKNEVKSLLSQVSDATEKRLQHSLAEAGMLKQIGELNLAMEESLIGGSVREDVYTCFLRDLSGGARNEVEELNLGFNMINESNDTSAGSTRKIEIEDLEMECLIMQEICGVISGEGIKEAKDMLKELYLEHLNEKEIRTSLD

SEQ ID NO: 549 - protein, 126 aa, Zea mays
AYTPTSPVDEVGHFDLLIKIYFKDEDPKYPNGGLMSQYLDSLPLGATIDIKGPHRHIEYTGRRRFVVNGKQRHARRLAMIQAGRGTTPDDDTEQAVLRDQPDDDTEMHLVYANRTDHDMLLREEID

SEQ ID NO: 550 - protein, 176 aa, Zea mays
PEPEEEKHFFTEGEDQLIWRATQEHGLNREVVNVLCQFIDSTPSEIEERSEVLFEKNEKNSGSSDKIERQLSLDKTMDAVLDSFDNLFCRRCLVFDCRLHGCSQNLVFPTEKQPYSFEPDENKKPCGRQCYLRWRGGFQEIHDVGLSGCATYNMESGTVSHKVDVSIMSESEDSNR

SEQ ID NO: 551 - protein, 76 aa, Solanum lycopersicum
VISKAEVNEGTTVKKLKPRARGRSFPIKRSTCHITIVMKDISLDDEYGEMSSLKKTRWKKKSTAMTYRDMYNSGGL

SEQ ID NO: 552 - protein, 101 aa, Zea mays
FEGKFHNKTNNHWSDRKNFKCYAKKYTWLEMDYGETEKEIEKGSITDQIKETKLETRIAQFISLICNISMMKQRMVEIGYNAEKLPLGKLRKATILKGYHV

SEQ ID NO: 553 - protein, 126 aa, Zea mays
ESCGGATGAAQEMSATKNHVMSERKRREKLNEMFLVLKSLLPSIHRVNKASILAETIAYLKELQRRVQELESSREPASRPSETTTRLITRPSRGNNESVRKEVCAGSKRKSPELGRDDVERPPVLT

SEQ ID NO: 554 - protein, 176 aa, Zea mays
PMETEIDQGVVLPDSRRRQAERLDYKKLYDEAYGEASSDSSDDEEWSGKNTPIIKSNEEGEANSPAGKGSRVVHHNDELTTQSTKKSLHSIHGSVDEKPGDLTSNGSNSTARKGHFGPVINQKLHEHFKTQPYPSRSVKESLAEELGLTFRQVNKWFETRRHSARVASSRKGISLD

SEQ ID NO: 555 - protein, 176 aa, Zea mays
MKERQRWRPEEDAVLRAYVRQYGPREWHLVSQRMNVALDRDAKSCLERWKNYLRPGIKKGSLTEEEQRLVIRLQAKHGNKWKKIAAEVPGRTAKRLGKWWEVFKEKQQRELRDSRRPPPEPSPDERGRYEWLLENFAEKLVGERPQQAAAAPSPLLMAAPVLPPWLSSNAGPAAAA

SEQ ID NO: 556 - protein, 76 aa, Solanum lycopersicum
SQVPDLDEEYREVMRDFAKRLEKLAEELLDLLCENLGLEKGYLKNAFYGSKGPNFGTKVSNYPPCPKPDLIKGLRA

SEQ ID NO: 557 - protein, 76 aa, Solanum lycopersicum; identical to SEQ ID NO: 556

SEQ ID NO: 558 - protein, 76 aa, Zea mays
KLDAIAEKQRLREIELEEKAKATREKLLKGSEAVRAPDSAPVAQPPRESAAAAAAAAAAAPAPSKYIPKFKRGGDS

SEQ ID NO: 559 - protein, 76 aa, Zea mays
RTARKVVNTHLLSAKMVFSKRREREEEVRLVVARIRDAAEASPGTALDMTELLGGYASDFVCRAVLGESHRKQGRN

SEQ ID NO: 560 - protein, 76 aa, Zea mays
MANARSGVAVNDECMLKFGELQSKRLHRFITFKMDDKFKEIVVDQVGDRATSYDDFTNSLPENDCRYAIYDFDFVT

SEQ ID NO: 561 - protein, 126 aa, Zea mays
GATGAAQEMSGTGTKNHVMSERKRREKLNEMFLVLKSLLPSIHRVNKASILAETIAYLKELQRRVQELESSREPASRPSETTTRLITRPSRGNNESVRKEVCAGSKRKSPELGRDDVERPPVLTMD

SEQ ID NO: 562 - protein, 76 aa, Solanum lycopersicum
AGLDPLFYCHHANVDRMWNEWKLIGGKRRDLSNKDWLNSEFFFYDENRNPYRVKVRDCLDSKKMGFDYPPMPTPWR

SEQ ID NO: 563 - protein, 76 aa, Zea mays
LFPDPHFKEKNHRRRVISMQLLDEYAYVMEVGGIIYTITDVEELGEWMRSCLEKHPLFETVPEEEIKADPVFKLLS

SEQ ID NO: 564 - protein, 76 aa, Zea mays
EMAGIVLSLDPKPIKGDWNGAGAHTNYSTKSMREAGGYEVIKEAIEKLGRRHREHIAAYGEGNERRLTGRHETADI

SEQ ID NO: 565 - protein, 76 aa, Solanum lycopersicum
MGRGRVQLKRIENKINRQVTFSKRRSGLLKKAHEISVLCDAEVGLIVFSTKGKLFEYANDSCMERILERYERYSFA

SEQ ID NO: 566 - protein, 101 aa, Zea mays
GPSNTEGTTSRAADLVAPTMAPTAEAAVDAEAAVDAEAEEAAAELDDGEETSGADASTEEAATQAPPRRAIRYRRSLTLKPSKPFDQRRVIEPKGTRAWKE

SEQ ID NO: 567 - protein, 176 aa, Oryza sativa
LPPHVACRVVDVELCADAATDEVYARLALRAEGEVFERNLHGGGIEREDDMEDGDEERKSRMLHMFCKTLTASDTSTHGGFSVPRRAAEDCFPPLDHKQLRPSQELVAKDLHGAKWRFRHIYRGQPRRHLLTTGWSSFVNKKKLVSGDAVLFLRGDDGELRLGVRRATQLKNEAIF

SEQ ID NO: 568 - protein, 101 aa, Solanum lycopersicum
MATEEPVIVNEVVEEQAAPETVKDEANPPAKSGKAKKETKAKKPAAPRKRSATPTHPPYFEMIKDAIVTLKERTGSSQHAITKFIEEKQKSLPSNFKKLLL

SEQ ID NO: 569 - protein, 176 aa, Solanum lycopersicum
KLVNEKEKLATDASAALAKERVQSEQVRQELNAAKEFASQQQTLASGCNKEVNVIKGQLAEAVERIEVLKEEVAQLNISLEEKTEELKEANHRANMVLAISEERQTLLSSLESKEIALRKQVEKIIGNINESSKMIADFECRVTGRLKTNNARFEHSFSQMDCLVKKANLLRRTTL

SEQ ID NO: 570 - protein, 76 aa, Zea mays
VDTKPCHIGDFDVKSINPTSYWIIMNLLEENEDLRNEFSNSEIMIANWEIKADAAKKRKASKLRGKPLRGGDTPSH

SEQ ID NO: 571 - protein, 76 aa, Solanum lycopersicum
ISDWGGRSELEIDRKARIWARVSRKQKISILVLSSAMGLNLREILENVCYPEIFLSFLNDKERKKIGSKENSILEF

SEQ ID NO: 572 - protein, 126 aa, Zea mays
MSYISGARSLPDEQVRIASTKMDGIGPKKAIQLRYRLGISGNIKIHELTKYQIDQIEQMIAQDHVVHWELKRGERADIERLISISRYRGIRHQDGSPLRGQRTHTNARTARKQIRKGNERRLPKEQ

SEQ ID NO: 573 - protein, 76 aa, Oryza sativa
RTTTRRSSGGDDGSPGGSDRKRMKRPMAVKKFMVEISFAAKDPMSAIAEVLRGQETENSMEALRVLDITLRQHSAK

SEQ ID NO: 574 - protein, 151 aa, Oryza sativa
GGPKIPMIYGRADVADGEECPPEGRLPAADPPSPAEHLREVFYRMGLSDKEIVALSGAHTLGRARPERSGWGKPETKYTENGPGAPGGQSWTSEWLKFDNSYFKEIKERRDEDLLVLPTDAVLFEDSSFKIHAEKYAEDQDAFFEDYAEAH

SEQ ID NO: 575 - protein, 276 aa, Zea mays
LLFIVLDQMDPEIDRQISEHVARMHRYCTDDGGARSLDKEGYAEEDDGDANAAIFVKYDRMLHGQDRRRGKKSKQDRLTVKFLKKYIHYAKNLIQPRLTDEASDHIATSYAELRDGSANAKSGGGTLPITARTLETIIRLSTAHAKMKLRHEVLKSDVEAALQVLNFAIYHKELTEMEEREQREMEMKQQADHDAGATGGTVDGHGSSGNDPMDVDVGSNDQNVSAERIEAFEALLGQHVLANHIDQMSIDDIEQMVNRESTAPYTRSQVEFILER

SEQ ID NO: 576 - protein, 276 aa, Zea mays
LLFIVLDQMDPEIDRQISEHVARMHRYCTDDGGARSLDKEGYAEEDDGDANAAIFVKYDRMLHGQDRRRGKKSKQDRLTVKFLKKYIHYAKNLIQPRLTDEASDHIATSYAELRDGSANAKSGGGTLPITARTLESIIRLSTAHAKMKLRHEVLKSDVEAALQVLNFAIYHKELTEMEEREQKEMEMKQQAEHDAGATGGTVDGHGSSGNDPMDVDVGSNDQNVSAERIEAFEALLGQHVLANHIDQMSIDEIEQMVNRESTAPYTRSQVEFILER

SEQ ID NO: 577 - protein, 176 aa, Zea mays
AAMMEFEINMSEMPLGKLSKENIEKGFEALTEIQNLLKDTADQALAVRESLIVAASNRFFTLIPSIHPHIIRDEDDLMIKAKMLEALQDIEIASKIVGFDSDSDESLDDKYMKLHCDITPLAHDSEDYKLIEQYLLNTHAPTHKDWSLELEEVFSLDRDGELNKYSRYKNNLHNKM

SEQ ID NO: 578 - protein, 76 aa, Oryza sativa
MANAASGMAVDDECKLKFLELKAKRTYRFIIYKIDEKKKMVVVEKVGEPVLNYDDFAASLPANECRYAIFDYDFVT

SEQ ID NO: 579 - protein, 76 aa, Oryza sativa
AEIAKQVADARPVLAFTTRELLPKLPRAHDLRVVLLESARLPGDSSDPRIVATIEEISATTPDPARRKDRVTQDDP

SEQ ID NO: 580 - protein, 176 aa, Solanum lycopersicum
MSPKPSENGIDGDDERDEEEEDSEEEEAEEEEEDEPRLKYQRMGASVPSLLSADAATCIAVAERMIALGTHGGAVHILDFLGNQVKEFAAHTAAVNDLCFDTDGEYVGSCSDDGSVVINSLFTDERMKFEYHRPMKAIALDPDYARTSSRRFVTGGLAGQLYLNVKKWLGYRDQVL

SEQ ID NO: 581 - protein, 226 aa, Solanum lycopersicum
TEGGGSTSHHNHTFHYPSIIRNHHHDSTETSGGGAGAGEVIEALKAKIIAHPQCSNLLDAYMDCQKVGAPPEVAARLSAVRQEFEARQRRSLTDRDVSKDPELDQFMEAYYDMLVKYREELTRPLQEAMEFMQKIEAQLNMLGNAPVRIFNSEDKCEGVGSSEEDQDNSGGETELPEIDPRAEDRELKNHLLRKYSGYLSSLKQELSKKKKKGKLPKDARQKLITW

SEQ ID NO: 582 - protein, 126 aa, Zea mays
PGFYMPINVKDQKLLQALIENRKRSAPYAGAFLVKDEEGTDPNIVTGSDSAKSIDDLKGKDLLKRLHEVGTLAQITSIQGDHVVLLGHRRLRITEMVEEDPLTVKVDHLKEKPYNKDDDVMKATSF

SEQ ID NO: 583 - protein, 126 aa, Oryza sativa
TKNTIDAEGWLHTGDIGYVDDDDEIFIVDRLKEIIKYRGFQVAPAELEALLITHPSIADAAVVGKQIEPEIGEIPVAFVAKTEGSELSEDDVKQFVAKEVIYYKKIREVFFVDKIPKAPSGKILRK

SEQ ID NO: 584 - protein, 76 aa, Solanum lycopersicum
MGRVRTKTVKKSSRQVIERYYSKMTLDFHTNKKILEEVAIIPSKRLRNKIAGFSTHLMKRIQKGPVRGISLKLQEE

SEQ ID NO: 585 - protein, 76 aa, Zea mays
AMGWNIVYQFRKAQSEIDNYLRLVPLITLVDNARIRDRLEYIERDQCEYSFDEEDKKVQDALLNPDPCTNPTIVLK

SEQ ID NO: 586 - protein, 176 aa, Solanum lycopersicum
MAVVAPTAREENVYMAKLADRAESDEEMVEFMEKVSNSLGSEELTVEERNLLSVAYKNVIGARRASWRIISSIEQKEESRGNEEHVNSIREYRSKIENELSKICDGILKLLDSKLIPSATSGDSKVFYLKMKGDYHRYLAEFKTGAERKEAAESTLTAYKAAQDIASAELAPTHPI

SEQ ID NO: 587 - protein, 101 aa, Oryza sativa
PLPRDGKALQEKIFFANERKTSEKEVNHVDTHEKFTVAPLDNAIARRPDMGGVEGAEIPLSANHFLVQFDPGQKIFHYNVDISPRPSKETARMIKKKLVEE

SEQ ID NO: 588 - protein, 76 aa, Oryza sativa
TPHEIESQLAAAGATVVITESMAADKLPSHSHGALTVVLIDERRDGCLHFWDDLMSEDEASPLAGDEDDEKVFDPD

SEQ ID NO: 589 - protein, 101 aa, Zea mays
IIDKLYLFWDNFLGSYEKEGINRKQNTDPVSKGKVFDLLASRSSNNTNQTPEELREIQTQIEHLTIHFDEGSVHESAGQLKGKFFNKDRQSARDYLLDKLK

SEQ ID NO: 590 - protein, 101 aa, Zea mays
STGRSPTLYKELRKEKPMLTPDITIMSVGTEITYGEAMVPDDGWEEYLNNKWDRNIVVAETVSFSELKLQPETEQRPHKVSFFVDKKNAQEVIKSVAERLD

SEQ ID NO: 591 - protein, 76 aa, Solanum lycopersicum
AIDRFCEPPEEGLMCELLWSDPQPQPGRGPSKRGVGLSFGGDVTKRFLQENNLDLVVRSHEVKDEGYEIEHDGKLI

SEQ ID NO: 592 - protein, 76 aa, Solanum lycopersicum
TNLTEYQKQYLETSAACERQMSKIIRDVDLENIEDGSLTLEKEDFFLGSVIDAVVSQVMLLLREKGVQLIRDIPEE

SEQ ID NO: 593 - protein, 101 aa, Zea mays
AGKKPKAEKRVPAGKSAGKEGGEGKRGRKKGKKSVETYKIYIFKVLKQVHPDIGISSKAMSIMNSFINDIFEKLAAEAAKLARYNKKPTITSREIQTSVRL

SEQ ID NO: 594 - protein, 276 aa, Zea mays
LRTYDHVFSSRPRSLVSDIIMYGATDSCFAPYGDHFRKARKLVTVHLLNASKVRSQRPAREEEVRGALDRVRRAAAAREPVDMSELLHSFVNNLVCRAVSGKFSMEEGRNRLFRELTDINAGLLGGFHIQDYFPRLGRIELVRKVACAKTRRVRKRWDDLLDKLIDDHAARMATHQDEDDDKDFIYVLLSLQKEYGLTRDHIKAILIDMFEAGTDTSYMTLEFAMTELIRKPHLMKKLQEEVRRNVPAGQEMVTEDNLPGMTDLKAVIKETLRLHP

SEQ ID NO: 595 - protein, 126 aa, Zea mays
VHEPQPQPQPQPEPQPQPQPEPEEEAPQKRAKKCTSDVWQHFTKKEIEVEVDGKKYVQVWGHCNFPNCKAKYRAEGHHGTSGFRNHLRTSHSLVKGQLCLKSEKDHGKDINLIEPYKYDEVVSLKK

SEQ ID NO: 596 - protein, 76 aa, Zea mays
SALDKTSQNQLARGRRLRELLKQSQSNPLPVEEQVATIYTGTRGYLDSLEIEQVKKFLDELRKHLKDTKPQFQEII

SEQ ID NO: 597 - protein, 276 aa, Zea mays
NGPGAIDWYKGLQPLVSHARTKGSTRVKLHRELAALLEEELSRRGTSVLPAGEQFGKWKGLQESTDREIVWPPMVIVMNTFLEKDEDDKWKGMGNQELLDYFGEYEASKARHAYGPSGHRGMSVLIFESSAVGYMEAERLHKHFVNQGTDRNSWHLRKVRFVPGGKRQLYGFLANKEDMEAFNKHCHGKSRLKYEMRSYNEMVVIQMKQMSEDNQQLNYLKNKMVKTEQRSKAVEESLGVVTQKLRETIEENIFVRSKAKEKHMEYEEEMKSQEEI

SEQ ID NO: 598 - protein, 276 aa, Zea mays
DSPKPAPARKNTKTAAKPLTAGVPGGRTHRAVLGIIRRVRSLELSDAPSPNSVHTSNSGAAAAAFHLTIELSPPREPGQYVVEKEKSRAVPWAAARDEGLKVALRREKKPREPTRAETELETHELRRLRRLARGIGRWARAKKAGVTDEVVKEVRREWASGEELAAVRIVEPLRRSMDRAREILEIKTGGLVVWTKGDMHFVYRGSKYQQNAKHSHTFLTNVHKDDAFQENDQSICGQKDEEPVKGTLYEREVNRLLDTLGPRFVDWWWDTPLPVD

SEQ ID NO: 599 - protein, 101 aa, Zea mays
QPDDDELSLGLSLGGRFGTDAKRPRLARSSSIASVCSVSSLHADPSPAAPLPLLRTTSLPTETEEERWRRREMQSRRRLEARRKRVERRNSMGSVSVAPAD

SEQ ID NO: 600 - protein, 76 aa, Zea mays
ENILVEMGTYFQVQDDYLDCYGDPEFIGKIGTDIEDYKCSWLVVQALERADESQKRILFENYGKKDPACVAKVKNL

SEQ ID NO: 601 - protein, 126 aa, Zea mays
KKIPVMEFDVAKVLEELELTMDQFIDLCILCGCDYCDSIKGIGGQTALKLIRQHGSIESILENLNKDRYQIPEDWPYQEARRLFKEPNVTLDIPELKWTAPDEEGLISFLVKDNGFNEDRVTKAIE

SEQ ID NO: 602 - protein, 76 aa, Zea mays
ELKYQLLKKYSGYLSSLRQEFSKKKKKGKLPKEARQKLLHWWELHYKWPYPSETEKIALAEATGLDQKQINNWFIN

SEQ ID NO: 603 - protein, 176 aa, Solanum lycopersicum
DVFMEHGKMGEFLDGLRSLAKDEFKKLKKSIDELRGSNSVSNKISRSEMAKLEGILQEKESGIWVQLDKTLDNIRMMVDTVFKRMDVMLQLSKTSLHHWQEEHLIKVELESMVMQCVIRTVQEEFEYKLWDQYAQLCGDRNEKLNAISSLRTELDAVLKSLSSSENGHVTSHGSHD

SEQ ID NO: 604 - protein, 76 aa, Solanum lycopersicum
KVFPLAKLDRAISFSITRPASSRTTQEKNEQEEILTFNKISYDDRNYVRFDVFLNVDKTVNADELDKAEFAGSYTS

SEQ ID NO: 605 - protein, 76 aa, Zea mays
TQRPSLKKALLLGDAFSDLPKVENHQPNDVMEYGGSPKTEFQRYIRLGRKDMLDWSFGEEAGPDEGKLLDHQPLRL

SEQ ID NO: 606 - protein, 76 aa, Zea mays; identical to SEQ ID NO: 605

SEQ ID NO: 607 - protein, 101 aa, Oryza sativa
ELQMKKAFRYVIFKIEEKQKQVVVEKTGATTESYDDFLASLPENDCRYALYDFDFVTGENVQKSKIFFIAWSPSTSRIRAKMLYSTSKDRIKQELDGFHYE

SEQ ID NO: 608 - protein, 176 aa, Zea mays
AVTSDQETGERRLEAGAMVLADRGVVCIDEFDKMNDQDRVAIHEVMEQQTVTIAKAGIHASLNARCSVIAAANPIYGTYDRSLTPTKNIGLPDSLLSRFDLLFIVLDQMDPEIDRQISEHVARMHRYCTDDGGARSLDKEGYAEEDDGDANAAIFVKYDRMLHGQDRRRGKKSKQD

SEQ ID NO: 609 - protein, 176 aa, Zea mays; identical to SEQ ID NO: 608

SEQ ID NO: 610 - protein, 176 aa, Zea mays; identical to SEQ ID NO: 608

SEQ ID NO: 611 - protein, 76 aa, Solanum lycopersicum
ADINLYFPYSESEKRLTAFHPEIDELLYSDVENDEHLCVLKDRTKPILFTMARLDRVKNLTGLVEWYAKNPRLRGL

SEQ ID NO: 612 - protein, 176 aa, Oryza sativa
MAPTSTFPVINMELLAGEERPAAMEQLDDACENWGFFEILNHGISTELMDEVEKMTKDHYKRVREQRFLEFASKTLKEGCDDVNKAEKLDWESTFFVRHLPESNIADIPDLDDDYRRLMKRFAAELETLAERLLDLLCENLGLEKGYLTKAFRGPAGAPTFGTKVSSYPPCPRPDL

SEQ ID NO: 613 - protein, 76 aa, Zea mays
TRDVCLLARMMASNLYCSQIEDLMFELSMWRCSDELRMRADVLHLSTKKDAKHYIEFWKKVPPNEPYRVILSDVRD

SEQ ID NO: 614 - protein, 101 aa, Solanum lycopersicum
DTNEYISYAPKDETKAQDRRPFGLLVIINPKLKKKGNKTALFFEGCLSVDGFRAVVERHLEVEVTGLDRNGKAIKVDASGWQARILQHEYDHLDGTLYVDK

SEQ ID NO: 615 - protein, 76 aa, Zea mays
EAGVDYELVPMSRQDGDHRRPEHLARNPFGKVPVLEDGDLTLFESRAIARHVLRKHKPELLGGGRLEQTAMVDVWL

SEQ ID NO: 616 - protein, 176 aa, Solanum lycopersicum
RPLIIEYPEKQLRDELKCTTWRFVVETNNLSPWKTIPEECADYVKEYMVGPGYKMEIDRVSDEAGEYAKSVDLGDDGRDVWIFDVDETLLSNLPYYSDHRYGLEVFDDVEFDKWVENGTAPALGSSLKLYQEVLKLGFKVFLLTGRSERHRSVTVENLMNAGFHDWHKLILRGSDD

SEQ ID NO: 617 - protein, 76 aa, Zea mays
LRTSSLPAEYMEDRLRRRAMQSQRRLEAKRKRLERRNSMSSGRPVPAAGGRDDGLEHTVPSGFQLRRSVALTTAGS

SEQ ID NO: 618 - protein, 76 aa, Zea mays
MAASTAAPCYDAPEGVDVRGRYDREFAGILTRDALDFVAGLQREFRGAVRYAMEQRREAQRRYDAGELPRFDPATT

SEQ ID NO: 619 - protein, 76 aa, Zea mays
ELKHQLLRKYGGYLGGLRQEFSKRKKKGKLPKEARQKLLHWWELHYKWPYPSETEKMALAETTGLDPKQINNWFIN

SEQ ID NO: 620 - protein, 76 aa, Oryza sativa
GNQQRPNYLPMEVCKIVEGQRYSKRLNQNQIRALLEETCQRPHDRERDIIQMVNHNSYHEDPYAKEFGIKISERLA

SEQ ID NO: 621 - protein, 76 aa, Solanum lycopersicum
PFNPTDKRTALTYLDGEGKMHRVSKGAPEQILNLAHNKSDIERRVHTVIDKFAERGLRSLGVAYQEVPEGRKESSG

SEQ ID NO: 622 - protein, 276 aa, Oryza sativa
ESTIKRLMLDLEKEKGKNNILSEQIIHLETSLDENKQKQLENISNTNILADTTKSHEKKIRELLKQLEDERSRSASMNDHLNVLQQQLSDAQNYFQKNIACELEKQLSRTTEEFASQISSLEERIADLISEKELVYEELKSTQEKMQQEMRHRQGLEDEILRLKQSLADNCSEESKALCGMVRSGSGLGSVPFMSKSGKSRELLSSQRSNISKIFEEVGLPNVLALLKSDELEVQIHAVKVVANLAAEDVNQEKIVEEGGLDALLSLLETSENTTI

SEQ ID NO: 623 - protein, 101 aa, Solanum lycopersicum
KNGITSYGLVENDSDLVHGLLEVEGALVGSSRTEKDCSQFDNDRVTLLLRPEPRNPLDMMQKGSWSILDQRFLYEKYESEFEEGEGEGALDPQEDLFNHIV

SEQ ID NO: 624 - protein, 151 aa, Zea mays
DALEEVIYHIETYDVTTIRASTPMFLMSRKIKSLGVKMVISGEGSDEIFGGYLYFHKAPNKKEFLEETCRKIKALHLYDCLRANKATSAWGVEARVPFLDKSFISVAMDIDPEWNMIKRDLGRIEKWVMRKAFDDDEHPYLPKHILYRQKE

SEQ ID NO: 625 - protein, 101 aa, Zea mays
IPVDKDGGTFQDESPFSSSNVMFGGNLGPKNAIIRPIKLPEVPKLPPYTTWIFLDRNQRMTEDQSVLGRRRIYYDTSCGEALICSDSEDEAIEDEEEKKEF

SEQ ID NO: 626 - protein, 276 aa, Zea mays
SGYREPLNKDKVFNTLLDHSNNKTNQTAEELKGIQTKIERMTMYFYEANVYESLGQLKNKFINIDEQTAKDYLLDKLEKPDDLDIVRAMGTYTLECIVVFVLSKQFNVFALDKASVQVATLVSELDSAAKIEYNRIIAEDRKRKKAKWGDKQINEDENILLQDKGVDTFNGDVHSELDRKKKSISKQTNRKRVRISKHKEPGIGEALFGWLASRKLIEVKKPVFLFDKKNKKPKNVIYPGYVDCLFDIKDLPFCSTLPMVYPPADWELWPTATAEV

SEQ ID NO: 627 - protein, 201 aa, Zea mays
RKHKISKHGPRYREHSPGKRQKVFTSDISFEGNIMNKLSIPEIRDTRLESRESGGDKLRILDESTKKTSRKDMCGESPATTMENVGRQSNKVSSTKNFLESTLSCWSALERDLYLKGIEIFGKNSCLIARNLLSGLKTCIEVANYMYNNGAAMAKRPLLNKSISGDFAENEQDYMEQDMAARTRIYRRRGRNRKLKYTWKS

SEQ ID NO: 628 - protein, 76 aa, Solanum lycopersicum
VEPRMKTAWEKIECTESLVPMRKAYKGTFIVAGGYDREDGNRALIEDRADLVAYGRLFISNPDLPKRFELNAPLNK

SEQ ID NO: 629 - protein, 176 aa, Oryza sativa
MSFIRKKSMEFLKSFEVPAKNPSEEAQRRWRDAVGTLVKNRRRRFRMVPDLDKRSQAETQRRKIQEKLRVALFVQKAALQFIDAVRKTEHPLPELARQCGFSVSAEELASIVRGHDTKSLRFHNGVDGIARKVAVSLADGVKSDDAGLRAEVYGANQYTEKPPRTFWMFLWDASQD

SEQ ID NO: 630 - protein, 76 aa, Zea mays
MAIKRTKAEKKIAYDKKLCSLLDEYTKVLIALADNVGSKQLQDIRRGLRGDSVVLMGKNTLIRRCIKVYAEKTGNH

SEQ ID NO: 631 - protein, 76 aa, Solanum lycopersicum
NKPPKLAVYAQARRVLSSKTKGDEIATPADLSFVVPLKIVEYPDPILRAKNKRIDNFDANLKKLVDEMFDIMYKTD

SEQ ID NO: 632 - protein, 176 aa, Oryza sativa
MSPAEASREENVYMAKLAEQAERYEEMVEFMEKVAKTTDVGELTVEERNLLSVAYKNVIGARRASWRIISSIEQKEESRGNEAYVASIKEYRSRIETELSKICDGILKLLDSHLVPSATAAESKVFYLKMKGDYHRYLAEFKSGAERKEAAENTLVAYKSAQDIALADLPTTHPIR

SEQ ID NO: 633 - protein, 101 aa, Zea mays
MDRLDGSARLLLVSDLDQTMIDHDDRENLSLLRFEALWEAEFAQDSLLVFSTGRTPVSYKGLRRDKPLVTPDVTIMSVGTVIAYGEEMVRDVGWEERLDSD

SEQ ID NO: 634 - protein, 76 aa, Zea mays
SHMLNLANLAEEVQIAYRRRIKLKKGDFADENSAITESDIEETLKRLVVDLKKSPAEVFDALKSQTVDLVLTAHPT

SEQ ID NO: 635 - protein, 76 aa, Solanum lycopersicum
RLTEVRKNGTCSWLRPDGKTQVTVEYHNDNGAMVPLRVHTVLISTQHDETVTNDEIARDLKEHVIKPVIPEKYLDE

SEQ ID NO: 636 - protein, 76 aa, Zea mays
LVEMWDEHHKVEFYSEQVEIIFSSIYDSVNQLGEKASLVQDRSITKHLVEIWLDLLKSMMTEVEWRLSKYVPTEKE

SEQ ID NO: 637 - protein, 101 aa, Zea mays
WAPTREDRIGVCKGIFRTDGVDEEHVVQLVDTFPGQSIDFFGALRARVYDDEVRRWVSETGVENIARKLVNSKEGPPTFEQPKITIEKLLEYGHMLVAEQE

SEQ ID NO: 638 - protein, 151 aa, Zea mays
VYGNIFALVRLGTYVTVWYCYTESAPDFISVDPHYLDIELIIDLFKVRKLFVWIPYEEVISTSILEAYDAVVERTALTDCLDRKLREEELSDKFEFWGKCSDGDHTIDSVEENATIEYASSKEGSACKEGVDSSCKEEGGGCEEEGSGSEE

SEQ ID NO: 639 - protein, 76 aa, Solanum lycopersicum
LIDDYPYAVDGLEIWSAIKSWVTDYCSFYYGSNEEILKDNELQAWWKEVREVGHGDKKNEPWWAEMETPQELIDSC

SEQ ID NO: 640 - protein, 176 aa, Zea mays
FKHSEDHIIRMTVQECGMSDAVLQTLARHMERAADDIKARYEILHGEKTKDSCKKGTEHNVKVEDLYCDKDLDAALDSFDNLFCRRCLVFDCKLHGCSQDLVFPTEKQPAWSGVDDSVPCGIHCHKLASEPDAAAGADHMLFDVEEPTHSSDNVMNQPGSNRKKNGSSGRKTKSQQ

SEQ ID NO: 641 - protein, 76 aa, Zea mays
KCVVLDIEGTTTPISFVTDVMFPYARDNVRKHLTSTFDFEETKEDIKLLRIQIEDDLQNGVAGAVPVPPDEGGKEE

SEQ ID NO: 642 - protein, 176 aa, Solanum lycopersicum
HEKDDILDKINNWTRAFMEQKLLNNGFIDRMSKKEVELALRKFYTTSHLAENRRYIKSYEENNFKILKAAYRSPNINNKDLLAFSIHDFELCQAQHREELQQLKRWFEDYRLDQLGLAERYIHASYLFGVTVIPEPELSDARLMYAKYVMLLTIVDDHFESFASKDECFNIIELVE

SEQ ID NO: 643 - protein, 201 aa, Zea mays
DDMAIVHEPQPQPQPQPEPQPQPQPEPEEEAPQKRAKKCTSDVWQHFTKKEIEVEVDGKKYVQVWGHCNFPNCKAKYRAEGHHGTSGFRNHLRTSHSLVKGQLCLKSEKDHGKDINLIEPYKYDEVVSLKKLHLAIIMHEYPFNIVEHEYFVEFVKSLRPHFPIKSRVTARKYIMDLYLEEKEKLYGKLKDVQSRFSTTMD

SEQ ID NO: 644 - protein, 101 aa, Solanum lycopersicum
GEGEEIVLVNPRVSRYSRRIIPYEEGCLSFPMIHGDVKRPESVKVDAQDINGTRFEISLSALPARVFQHEFDHLQGVLFFDKMTDEVLDTIREKLVALEKK

SEQ ID NO: 645 - protein, 76 aa, Solanum lycopersicum
SILKDPEDDTEMYVVYANRTEDDILLKDELDAWAEQVPNRVKVWYVVQESITQGWKYSTGFVTESILREHIPEPSH

SEQ ID NO: 646 - protein, 76 aa, Solanum lycopersicum
YALSGKAWDLVLEQRIAFTRKKDFGKELRELQWAHAQRTLHGLQVPDPKIFSETTNFNELNQLAEEAKRRAEIARL

SEQ ID NO: 647 - protein, 76 aa, Oryza sativa
HLREVFYRMGLSDKEIVALSGAHTLGRSRPERSGWGKPETKYTKNGPGAPGGQSWTSQWLKFDNSYFKDIKERRDE

SEQ ID NO: 648 - protein, 76 aa, Zea mays
WPIHEVEKLRGKAVSVDAKLVKPGDHFEVTGIATYQADVEVSFELELEAGTSLLEKAEAFDPAYDDDAQKLCGVKG

SEQ ID NO: 649 - protein, 251 aa, Solanum lycopersicum
SLMTHAKTKGLRVKIHRELAELLEEDLRQRGTSVVPPGEVYGRWGGMEFKDKEIVWPPMVIIMNTRLDKDENDKWIGMGNQELLEYFSSYAAVKARHSYGPQGHRGMSLLIFEASAVGYIEADRLSEHFSENGRNRDAWERRSARFYPGGKRLLYGYMADKKDIDNFNQHSAGKSKLKFEMRSYKEAVWNPAKQMREDNQQLIWFKNKAAKHQMQAKALEESLSLVSEKHRQTLEENKIVRLKTKMHHEQI

SEQ ID NO: 650 - protein, 101 aa, Zea mays
FTKEVVKNKKYLAVAVPDEGAQTLLVQAIEAFGGKCNPEALKEVPVVLKALYDGDILDEETIVDWYNDAVAAGKDSQVVKNAKPFVEWLQSAESDEEGDDE

SEQ ID NO: 651 - protein, 76 aa, Solanum lycopersicum
ENKSDSFFSRLPFEVQVKKNLEISYNSNTSKHNFVDMPGNLHINNYLRKGNILDRERNLDRKYFDWKIIHFSLRQK

SEQ ID NO: 652 - protein, 101 aa, Zea mays
EMAGIVLSLDPKPIKGDWNGAGAHTNYSTKSMREAGGYEVIKAAIDKLGKRHKEHIAAYGEGNERRLTGRHETADINTFKWGVANRGASIRVGRDTEREGK

SEQ ID NO: 653 - protein, 126 aa, Zea mays
VPDFLKGDYLDDKKNFTEWLEAHSPVKAAEDAKPLFAALKKEGKSVAVGGYCWGGKLSVEVGKTSDVKAVCLSHPYSVTADDMKEVKWPIEILGAQNDTTTPPKEVYRFVHVLRERHEVPFRRQDR

SEQ ID NO: 654 - protein, 101 aa, Solanum lycopersicum
DAIDTAIVGMLADPKEARAGIREIHFLPFNPTDKRTALTYLDGEGKMHRVSKGAPEQILNLAHNKSDIERRVHTVIDKFAERGLRSLGVAYQEVPEGRKES

SEQ ID NO: 655 - protein, 76 aa, Solanum lycopersicum
VWCRRTDELVDGPNASHITPQALDRWEARLEDIFNGRPFDMLDAALSDTVSRFPVDIQPFRDMVEGMRMDLWKSRY

SEQ ID NO: 656 - protein, 76 aa, Oryza sativa
GGGGGGRTKKKAAGKGGPENGKFRYRGVRQRSWGKWVAEIREPRKRSRKWLGTFATAEDAARAYDRAALLLYGPRA

SEQ ID NO: 657 - protein, 226 aa, Zea mays
KIGIQNTNNEQMAWNLKHLTGGTVILRNKDFIILYRGKDFLPGGVAQTVIQREAQVHDEQVKEEEARLKAVDSLQMVGELSEESSLGTFREYQGFHAKFVHENTENSNTMIELEAEKYRLEKELKDHEWKLSVLNKKIERSNQALAKLHSSWSPSEQSADREHLTEEEKIMFRRIGRKMDGLVLLGRRGIFDGVIEEIHQHWKHKEVVKVITKQNQTRQIMYAASL

SEQ ID NO: 658 - protein, 276 aa, Zea mays
LLFIVLDQMDPEIDRQISEHVARMHRYCTDDGGARSLDKEGYAEEDDGDANAAIFVKYDRMLHGQDRRRGKKSKQDRLTVKFLKKYIHYAKNLIQPRLTDEASDHIATSYAELRDGSANAKSGGGTLPITARTLETIIRLSTAHAKMKLRHEVLKSDVEAALQVLNFAIYHKELTEMEEREQREMEMKQQADHDAGATGGTVDGHGSSGNDPMDVDVGSNDQNVSAERIQAFEALLGQHVLANHIDQMSIDEIEQMVNRESTAPYTRSQVEFILER

SEQ ID NO: 659 - protein, 101 aa, Solanum lycopersicum
PSGTFSAWKANATGRNSNSTREFLEKNYKETSGQETVKLAIRALLEVVESGGKNIEVAVMTKEHGLKQLEEAEIDAIVAEIEAEKAAAEAAKRPHRRNLVE

SEQ ID NO: 660 - protein, 76 aa, Solanum lycopersicum
GEDMGNFYSAGLDPLFYCHHSNVDRMWNEWKATGGKRTDIQNKDWLNSEFFFYDENGNPFKVRVRDCLDTKKMGYD

SEQ ID NO: 661 - protein, 76 aa, Solanum lycopersicum
VKASGSRTSKKQVEITYNPEEKFNKLADEVDREAGLSRLTLFSPCKINVFLRITSKRDDGYHDLASLFHVISLGDK

SEQ ID NO: 662 - protein, 276 aa, Solanum lycopersicum
MGSLCSRNKHYSQADDEENTQTAEIERRIEQETKAEKHIQKLLLLGAGDSGKSTIFKQIKLLFQTGFDEEELKNYIPVIHANVYQTTKILHDGSKELAQNELEASKYLLSAENKEIGEKLSEIGGRLDYPHLTKDLVQDIEALWKDPAIQETLLRGNELQVPDCAHYFMENLERFSDVHYIPTKEDVLFARIRTTGVVEIQFSPVGENKKSGEVYRLFDVGGQRNERRKWIHLFEGVTAVIFCAAISEYDQTLFEDERKNRMMETKELFEWVLKQP

SEQ ID NO: 663 - protein, 276 aa, Zea mays
EISFEEQLSMLDSVHLKVRLSKATELVDRHLQSILVAEKITQKVEGQLSKSQKEFLLRQQMRAIKEELGDNDDDEDDVAALERKMQNAGMPANIWKHAQREMRRLRKMQPQQPGYSSSRAYLELLADLPWQKVSEERELDLRVAKESLDQDHYGLTKVKQRIIEYLAVRKLKPDARGPVLCFVGPPGVGKTSLASSIAKALNRKFIRISLGGVKDEADIRGHRRTYIGSMPGRLIDGLKRVSVSNPVMLLDEIDKTGSDVRGDPASALLEVLDPEQ

SEQ ID NO: 664 - protein, 126 aa, Solanum lycopersicum
EGTDDKLYEAHRDWGRRFMKLYPQYTSWDNSKVPERPLVIGYVSPDYFTHSVSYFIEAPLAHHDYTNYKVVVYSSVVKADAKTNRFRDKVMKKGGLWRDIYGIDEKKVSSMIREDKVDIMVELTGH

SEQ ID NO: 665 - protein, 176 aa, Zea mays
RVEAQLDCISGGGGSSSARLSLADGKSEGVGSSEDDMDPNGRENDPPEIDPRAEDKELKYQLLKKYSGYLSSLRQEFSKKKKKGKLPKEARQKLLHWWELHYKWPYPSETEKIALAESTGLDQKQINNWFINQRKRHWKPSEDMPFVMMEGFHPQNAAALYMDGPFMRDGMYRLGS

SEQ ID NO: 666 - protein, 76 aa, Solanum lycopersicum
SEERQTLLSSLESKEIALRKQVEKIIGNINESSKMIADFECRVTGRLKTNNARFEHSFSQMDCLVKKANLLRRTTL

SEQ ID NO: 667 - protein, 76 aa, Zea mays
EMEEREQREMEMKQQADHDAGATGGTVDGHGSSGNDPMDVDVGSNDQNVSAERIEAFEALLGQHVLANHIDQMSID

SEQ ID NO: 668 - protein, 76 aa, Solanum lycopersicum
SMLPGFSAELMPKGRENESQAKIKRYMTMMDSMTNEELDSSNPKLMTDSRIMRIARGSGRQVHEVMDMMEEYKRLA

SEQ ID NO: 669 - protein, 76 aa, Oryza sativa
RYMADPDTDEVFARIRLVPLRAAEDGDVEEDGAAAGEEHEKPASFAKTLTQSDANNGGGFSVPRYCAETIFPRLDY

SEQ ID NO: 670 - protein, 76 aa, Solanum lycopersicum
LNFSVFYYEILNSPDRACNLAKQAFDEAIAELDTLGEESYKDSTLIMQLLRDNLTLWTSDMQDDGADEIKETKNDN

SEQ ID NO: 671 - protein, 126 aa, Zea mays
SLNCRSIPTNNCESRALVEKSEHCPDDYNLEMKRKRNDGTKGTVVLNSGSKVEGLLCLLEQAIHSGRALVLSEDELADSDLVYEKSVAFTKSIPRRLVFENTRRKSSARRNVPDNHARTKTHLVEN

SEQ ID NO: 672 - protein, 101 aa, Zea mays
YTGELISHKEADKRGKIYDRANSSFLFDLNDQYVLDAYRKGDKLKFANHSSNPNCYAKVMLVAGDHRVGIYAKEHIEASEELFYDYRYGPDQAPAWARRPE

SEQ ID NO: 673 - protein, 76 aa, Solanum lycopersicum
TPSNCVDQSTYPDYYFRITNSEHMTELKEKFKRMCDKSMINKRYMHLTEEILKENPNICEYMAPSLDARQDIVVVE

SEQ ID NO: 674 - protein, 126 aa, Zea mays
TYSATEPVRVKKKWQIPHGTKNDYLMKWFKSQKVKKPERVLPPMSPEKSGSKATQRTSLLSSKGLDKLRFSVVGQSKEAANEWIEKLKLAGANFYARVVKDIDCLIACGELDNENAEVRKARRLKI

SEQ ID NO: 675 - protein, 76 aa, Oryza sativa
PNLEVKFVDPDTGRSLPANTPGELCVRSQSVMQGYYKRKEETERTVDGKGWLHTGDVGYIDGDGDVFIVDRIKELI

SEQ ID NO: 676 - protein, 176 aa, Zea mays
ATRGNPRPPSQTSRPVLAPPLANGWQWQSRPRPSGSEVKKDDAPPSGSVPEVENVDGNNTSDDDDDDDDDLSDDISDDYDSDASEKSFETRKTNKWFKEFFEVLNTLSLEQINEQTRQWHCPACKNGPGAIDWYKGLQPLVSHARTKGSTRVKLHRELAALLEEELSRRGTSVLPA

SEQ ID NO: 677 - protein, 76 aa, Solanum lycopersicum
EYGIQRDQIGKDTLNHRTIMKYTINQYLSNLKKSQKKWFEPLILISRTERSMNRDPDAYRYKWSNGSKSFQEHLEQ

SEQ ID NO: 678 - protein, 76 aa, Zea mays
EMEEREQKEMEMKQQAEHDAGATGGTVDGHGSSGNDPMDVDVGSNDQNVSAERIEAFEALLGQHVLANHIDQMSID

SEQ ID NO: 679 - protein, 76 aa, Solanum lycopersicum
HPAFTQETLSFGNLKDRLDNLLSENHQLRDLVKEKKNEVKSLLSQVSDATEKRLQHSLAEAGMLKQIGELNLAMEE

SEQ ID NO: 680 - protein, 76 aa, Solanum lycopersicum
GSSEAIMLAGLAFKRKWQSKRKAEGKPFDKPNIVTGANVQVCWEKFARYFEVELKEVKLKEGYYVMDPAKAVEIVD

SEQ ID NO: 681 - protein, 76 aa, Zea mays
DMSVTCKEYYDPNRSMLELVFAPADEWIGRSDTEIIDATMEELAKLFPDEIAADQSKAKILKYHIVKTPRSVYKTV

SEQ ID NO: 682 - protein, 76 aa, Solanum lycopersicum
EKELLRVVDREYLFAYADDPCSSNYPLMQKLRQVLVDQAMKNGESEKNVNSSIFQKIGAFEDELIAVLPKEVESVR

SEQ ID NO: 683 - protein, 76 aa, Zea mays
LLEVETGGILIAVEKLTTSHAIILYRGKNYRRPAKSSFSNLLTKREALRRSIEVQRRGSMKYFVRERQKSILELKR

SEQ ID NO: 684 - protein, 76 aa, Solanum lycopersicum
HTAVEDLELYPNKKSLKEHVEDLKTLISSAITNQETCLDGFSHDEADKKVRKVLLKGQKHVEKMCSNALAMICNMT

SEQ ID NO: 685 - protein, 176 aa, Oryza sativa
MEKLDRYLQENFDVPAKNPSEEAQRRWRQAVGTIVKNRRRRFRWVPDLERRSLDKAKVRSTQEKIRVALYVQQAALIFSDGAKKKEYKLTGDIIKAGYAINPDELALITSKHDSKALKMHGGVDGISIKVRSSFDHGIYASELDTRQNIYGVNRYAEKPSRSFWMFVWDALQDMTL

SEQ ID NO: 686 - protein, 126 aa, Oryza sativa
EASAKGTGSHEDSGQLSAFSKVTKEHIAADESPQEIQSHQNYTARTRIKVQMHGNAVGRAVDLANLDGYEQLMNELEEMFNIKDLKQKWKVAFTDDEGDTMEVGDDPWLEFCQMVRKIVLYPIEDE

SEQ ID NO: 687 - protein, 276 aa, Zea mays
DLALGVNSYYVLQIIEQDDGSECYVFRKWGRVGSEKIGGQKLEEMSKTEAIKEFKRLFLEKTGNSWEAWECKTNFRKQPGRFYPLDVDYGVKKAPKRKDISEMKSSLAPQLLELMKMLFNVETYRAAMMEFEINMSEMPLGKLSKENIEKGFEALTEIQNLLKDTADQALAVRESLIVAASNRFFTLIPSIHPHIIRDEDDLMIKAKMLEALQDIEIASKIVGFDSDSDESLDDKYMKLHCDITPLAHDSEDYKLIEQYLLNTHAPTHKDWSLELE

SEQ ID NO: 688 - protein, 176 aa, Solanum lycopersicum
SLNLKGLSLFSDQEQRRANSEKRTKFVKFVFNALDPNETKSGKKSIGIKEISKKVPRWSHKLITELDQQMGEFKDRASMDHQLRSRKAKRVVIFTDNKATKDAEEEVALISYSQQSDFRRGIITGSMRAQRRKTFISKLFQANVHSPLFVDRITPLRLFSFDISELIKPILKNWTD

SEQ ID NO: 689 - protein, 76 aa, Zea mays
KISESIVKDPEYDELFKLMSTCGRLLNDVQTFEREYNEGKLNSVSLLVLHGGPMSISDAKRKLQKPIDTCRRDLLS

SEQ ID NO: 690 - protein, 76 aa, Solanum lycopersicum
KLVNEKEKLATDASAALAKERVQSEQVRQELNAAKEFASQQQTLASGCNKEVNVIKGQLAEAVERIEVLKEEVAQL

SEQ ID NO: 691 - protein, 76 aa, Zea mays
RRVYYKDDDDNWIYIPDDNEAQFIREGYYGGHTDVYKPYGENLYYYDVNSLYPSSMLDDMPIGKTRWVSDLGSKKS

SEQ ID NO: 692 - protein, 76 aa, Zea mays
PLKERFYLQPLPPAEAAARVKTSAQDIINLKPLIDKKAWPYVQNDLRLRASYLRYDLKTVIASKPKEEKKSLKELT

SEQ ID NO: 693 - protein, 276 aa, Oryza sativa
GSNTSLPNGTDNLFPDNLPLVLKSKLLIVDLAGSERIDKSGSEGHMIEEAKFINLSLTSLGKCINALAENSPHIPTRDSKLTRILRDSFGGTARTSLIVTIGPSSRHFSETSSTIMFGQRAMKIVNTIRIKEEVDYESLYKKVEHEVDHLTSEMERQQKLKNSEKMQLEKKLKESEASLNDLKVTSNMQIENMAMEKRQLESTIKRLMLDLEKEKGKNNILSEQIIHLETSLDENKQKQLENISNTNILADTTKSHEKKIRELLKQLEDERSRSAS

SEQ ID NO: 694 - protein, 126 aa, Zea mays
MEFWGLEVKPGSTVKCEPGHGFILHVSQAALGESKKSDSALMYVKVDDKKLAIGTLSIDKYPQIQFDLVFNKEFELSHTSKTTSVFFSGYKVEQPIEGDEMDLDSEDEEEELNIPVIKENGKADGK

SEQ ID NO: 695 - protein, 101 aa, Oryza sativa
DVTGPEQCPPEGKLPDAGPSAPADHLRKVFYRMGLDDKEIVVLSGAHTLGRSRPERSGWGKPETKYTKNGPGAPGGQSWTAEWLKFDNSYFKEIKEKRDQD

SEQ ID NO: 696 - protein, 76 aa, Zea mays
YTKIFLKFPRKFWPEGKGREFFLYASSRRGYYGVWQEFEKQYPDANVLLVTVTDEESRRIEQQSDEQTKAEIMQVL

SEQ ID NO: 697 - protein, 76 aa, Zea mays
LEKDLQKEVNSVNQRLNIAIEKVKEPYRQPNILAEYIAFQLKNRVSFRKAMKKAIELTKKADIKGIKIQIAGRLAG

SEQ ID NO: 698 - protein, 76 aa, Solanum lycopersicum
SIPKQAQNYDPEGEFVAYWLPELRALPREKRHSPGMMYLNPIVALKHGYTKKTGDSKTAFSSRRGRPEDNRRKRHG

SEQ ID NO: 699 - protein, 76 aa, Zea mays
HLRAMEIAKEAGALLSYDPNLREALWPSREEARTQILSIWDQADIVKVSEVELEFLTGIDSVEDDVVMKLWRPTMK

SEQ ID NO: 700 - protein, 76 aa, Solanum lycopersicum
DELPENNPKLRAHAVKVFKMTCESAIQLREKGEVVVGETTLKYLGSIHLQKRVADPHFEVVKEALLRTVKEATGNK

SEQ ID NO: 701 - protein, 101 aa, Zea mays
RLIAYIQKHGHTNWRALPKQAGLLRCGKSCRLRWINYLRPDLKRGNFTDEEEEAIIRLHGLLGNKWSKIAACLPGRTDNEIKNVWNTHLKKKVAQREKKKA

SEQ ID NO: 702 - protein, 176 aa, Zea mays
QIKTLRRQVASRESERAERATLVTQEKLQIGSNRMKMMRLSDVWIRPAFGGRGRKLTGNLEAHFNGFRYSTSRSDERVDIMFGNIKHAFFQPAEKEMITLLHFHLHNHIMVGNKKTKDVQFYVEVMDVVQTLGGSRRSALDPDEIEEEQRERDRKNRINMDFQNFVNKVNDHWSQP

SEQ ID NO: 703 - protein, 76 aa, Zea mays
AKFVEDKHKAKLPPNFRKLLNVQLKKLVAGGKLTKVKNSYKLSSATKPNPKPKAAPKKPKTGAKKPKAAAKPKAKT

SEQ ID NO: 704 - protein, 101 aa, Zea mays
AMRNAIEGMNGKELDGRNITTTGSAKATIFDEYLEKSKANKELNDKKRLATSGANFARAYTVEFGSCQFPYNFTGCQDLAKQKKVPFISDDLEIECEGKEK

SEQ ID NO: 705 - protein, 76 aa, Solanum lycopersicum
ANAQYYQQEASKLRAQIGNLMNQNRNMMGEALAGMKLKELKNLEQRIEKGISKIRSKKNELLFAEIEYMQKREVDL

SEQ ID NO: 706 - protein, 126 aa, Zea mays
WTGRKPLPKSRKELPEFDSFVLPAPGKKGVKPVQSPGPFLAGMEPRYQSVSREDILGEPLTKEEVSELVKGSLKSKRQLNMGRDGLTHNMLENIHSHWKRKRVCKIKCKGVCTIDMDNICHQLEEK

SEQ ID NO: 707 - protein, 76 aa, Zea mays
SGYREPLNKDKVFNTLLDHSNNKTNQTAEELKGIQTKIERMTMYFYEANVYESLGQLKNKFINIDEQTAKDYLLDK

SEQ ID NO: 708 - protein, 126 aa, Zea mays
ARCHYRSAKVDNIVYCLGDDVYVKAGENEADYIGRITEFFEGTDRCHYFTCRWFFRAEDTVINSLVSINVDGHKHDPRRVFLSEEKNDNVLDCIISKVKIVHVDPNMDPKAKAQLIEHCDLYYDMS

SEQ ID NO: 709 - protein, 126 aa, Zea mays; identical to SEQ ID NO: 708

SEQ ID NO: 710 - protein, 76 aa, Zea mays
YSTKSMRSDGGYEVIKKAIGKLGLRHREHIAAYGDGNERPLTGRHETADINTFVWGVPNRGASVRVGRDTEKEGKG

SEQ ID NO: 711 - protein, 76 aa, Oryza sativa
HPEFRYKTEFQSHEPEFDYLKSLEIEEKINKIKWCQTANNALFLLSTNDKTIKYWKVQERKVKRISVMNLNTSQSS

SEQ ID NO: 712 - protein, 101 aa, Zea mays
VRCGGRILVSDRAHLLFDLHQAVDGLREAELENSFIGTTKRGIGPCYSSKVTRNGLRVCDLRHMDTFGDKLDILFKDAASRFQGFQYSKSLLKEEVERYKK

SEQ ID NO: 713 - protein, 176 aa, Zea mays
LDKKLAQRKHFPSVNWLISYSKYSKALESFYEKFDPDFIDIRTKAREVLQREDDLNEIVQLVGKDALAESDKITLETAKLLREDYLAQNAFTPYDKFCPFYKSVWMMRNIIHFNTLANQAVERAAGTDGHKITYSVIKHRLGDLFYRLVSQKFEDPAEGEEALVGKFKKLYDDLTT

SEQ ID NO: 714 - protein, 76 aa, Zea mays
SGCELKNTMMMGADLYETEDEISRLLAEGKVPIGVGENTKISNCIIDMNCQGWKERLHNKQRGRSKSPDRPGRRIL

SEQ ID NO: 715 - protein, 151 aa, Zea mays
RDAPELLPNLTKSAGTGIGLEFRESGLNLNAKNDRRIKKGMVFNVSLGLHNIQAETTSEKTKQFSLLLADTVLVNERGHEILTAPCSKAFKDVAYSFNEDDDAVAAEVKIKSKTIDVMPTKATLRSDNQEMSKEELRRQHQAELARQKNEE

SEQ ID NO: 716 - protein, 226 aa, Solanum lycopersicum
KQEQEGSTEEDPYPSPSLFSEEGWDPDKIDETEEIRVNGKDKIKDKFHSHLTETGYNNINTSNSPIYDYQDSYLNNNNTGNLENCKLQLLDKKNENQEQDLFWFQKPLVSLLFDYNRWNRPFRYIKNNRFEQAVRTEMSQYFFDTCKSDGKQKISFTYPPSLSTFWKMIKRKIPLLSLQKTLPNELDTQWVSTNKEKSNNLNKEFLNRLEILDKESLSLDILETRT

SEQ ID NO: 717 - protein, 176 aa, Solanum lycopersicum
EAGKAEMPTSTDPDILVRLKYLEKENAALKIELVSCSEVLEIRTIERDLSTQAAETASKQQLESIKKLTKLEVECRKLQAMARKSSPFNDQRSSAVSSFYVDSVTDSQSDSGERLNTVDNDALKMSKLETREYEPSCSNSWASALIAELDQFKNEKAMPKTLAACSIEIDMMDDFL

SEQ ID NO: 718 - protein, 176 aa, Zea mays
DITPDDKQELDEALQREIQAAFRTDEIRRTQPTPQDEMRAGMSYFHETIWKGVPKFLRRVDTALKNIGINERVPYNAPLIQFSSWMGGDRDGNPRVTPEVTRDVCLLARMMASNLYCSQIEDLMFELSMWRCSDELRMRADVLHLSTKKDAKHYIEFWKKVPPNEPYRVILSDVRD

SEQ ID NO: 719 - protein, 76 aa, Solanum lycopersicum
LIEIIDLIPNPINRITFSRNTRHLSHTSKEIYSLIRKRKNVNGDWIDEKIESWVANSDSIDDEEREFLVQFSTLTT

SEQ ID NO: 720 - protein, 101 aa, Solanum lycopersicum
VKISEQLGNTVTNDYDYVFSENGLVAHKDGKLIGKQSLKSHLGDEKLKEFINFTLHYIADLDIPIKRGTFIEFRSGMLNVSPIGRNCSQEERDEFEKYDKV

SEQ ID NO: 721 - protein, 76 aa, Oryza sativa
KDKVEEEEVVPPAATERPRVHSFCKTLTASDTSTHGGFSVLRRHADECLPPLDMSQHPPTQELVAKDLHGVEWRFR

SEQ ID NO: 722 - protein, 76 aa, Solanum lycopersicum
RFTSERKNALILYRVNVDKESDLEKMIEDMKSSNMTTLNLSHNELVVDHLKHLVGGSANISDEIFGEFIVPEKAET

SEQ ID NO: 723 - protein, 76 aa, Zea mays
FYEYAREQLLGQLRIKCRNLMGKDKVMELIEKFIDLGRIGKLIKGIEMMIEIILRKRRIPYGYNSYLNEVQKMRSF

SEQ ID NO: 724 - protein, 126 aa, Zea mays
ERVEGVGFISGEEAVNWGLSGPMLRASGIQWDLRKIDPYESYNQFDWKVQWQKEGDSLARYLVRVGEMRESIKIIQQAVEKIPGGPYENLEARRFKKAKNPEWNDFEYRFLGKKPSPNFELSKQEL

SEQ ID NO: 725 - protein, 76 aa, Oryza sativa
QVGNQQRPNYLPMEVCKIVEGQRYSKRLNEKQITALLKVTCQRPQERELDILRTVSHNAYHEDQYAQEFGIKIDER

SEQ ID NO: 726 - protein, 176 aa, Solanum lycopersicum
MAREENVYMAKLAEQAERYEEMVQFMEKVSTSLGSEELTVEERNLLSVAYKNVIGARRASWRIISSIEQKEESRGNEEHVKCIKEYRSKIESELSDICDGILKLLDSNLIPSASNGDSKVFYLKMKGDYHRYLAEFKTGAERKEAAESTLSAYKAAQDIANTELAPTHPIRLGLAL

SEQ ID NO: 727 - protein, 126 aa, Zea mays
RGHMTERAELLKEEVRKTLKAAANQITNALDLIITLQRLGLDHHYENEISELLRFVYSSSDYDDKDLYVVSLRFYLLRKHGHCVSSDVFTSFKDEEGNFVVDDTKCLLSLYNAAYVRTHGEKVLDE

SEQ ID NO: 728 - protein, 176 aa, Solanum lycopersicum
MENFPIINLEKLNGAERVATMEKINDACENWGFFELVNHGIPHEVMDTVEKLTKGHYKKCMEQRFKELVAKKGLEGVEVEVTDMDWESTFFLRHLPSSNISQLPDLDDVYREVMRDFRKRLEKLAEELLDLLCENLGLEKSYLKNTFYGSKGPNFGTKVSNYPPCPKPDLIKGLRA

SEQ ID NO: 729 - protein, 276 aa, Zea mays
EVKKEKMVTATKKGAAVLDQHIPDHIKVNYHVLQVGDEIYDATLNQTNVGDNNNKFYIIQVLESDAGGSFMVYNRWGRVGVRGQDKLHGPSPTRDQAIYEFEGKFHNKTNNHWSDRKNFKCYAKKYTWLEMDYGETEKEIEKGSITDQIKETKLETRIAQFISLICNISMMKQRMVEIGYNAEKLPLGKLRKATILKGYHVLKRISDVISKADRRHLEQLTGEFYTVIPHDFGFRKMREFIIDTPQKLKAKLEMVEALGEIEIATKLLEDDSSDQD

SEQ ID NO: 730 - protein, 76 aa, Solanum lycopersicum
MVKLRLKRCGRKQRAVYRIVAIDVRSRREGKDLQKVGFYDPIKNQTYLNVPAILYFLEKGAQPTETVQDILKKAEV

SEQ ID NO: 731 - protein, 76 aa, Zea mays
VDKLIPVDVYLPGCPPKPEAVIDALTKLRKKIAREIIEDRTLCQSQKKNRSFTTRHKLYVRRSTHTGTYEQELLYQ

SEQ ID NO: 732 - protein, 76 aa, Solanum lycopersicum
MDLCKKSINDPLNWEMAADSLRGSHLDEVKKMVDEFRKPIVKLGGETLSVAQVASIANVDDKSNGVKVELSESARA

SEQ ID NO: 733 - protein, 176 aa, Zea mays
DLALGVNSYYVLQIIEQDDGSECYVFRKWGRVGSEKIGGQKLEEMSKTEAIKEFKRLFLEKTGNSWEAWECKTNFRKQPGRFYPLDVDYGVKKAPKRKDISEMKSSLAPQLLELMKMLFNVETYRAAMMEFEINMSEMPLGKLSKENIEKGFEALTEIQNLLKDTADQALAVRESL

SEQ ID NO: 734 - protein, 76 aa, Zea mays
ERKLLMGGFAEVQSSAASSQDSVQSVTVKAKKASWSMGSSFPLKKTTKALPKIQIDDDSDLIDEDSLLTEEDLKKP

SEQ ID NO: 735 - protein, 76 aa, Oryza sativa
DGPNRKLSKAELLTVKNELFEHESLQELSSAVAYDGERNLYTCAELPEDCIVPVSKFRVKDSSRTYIVSVKLKKPL

SEQ ID NO: 736 - protein, 76 aa, Zea mays
RRLRHRGPDWSGLHCHEDCYLAHQRLAIIDPTSGDQPLYNEDKTVVVTVNGEIYNHEELKAKLKTHEFQTGSDCEV

SEQ ID NO: 737 - protein, 151 aa, Solanum lycopersicum
RMWNEWKAIGGKRRDISEKDWLNSEFFFYDEHKNPYRVKVRDCLDTKKMGYDYAPMPTPWRNFKPKSKASVGKVNTSTLPPANEVFPLAKMDKTISFAINRPASSRTQQEKNEQEEMLTFNNIRYDNRGYIRFDVFLNVDNNVNANELDKA

SEQ ID NO: 738 - protein, 151 aa, Oryza sativa
AIDLLEPMKQKHPKITYADLYQLAGVVAVEVTGGPTIDYVPGRRDSSDSPEEGRLPDAKKGAAHLREVFYRMGLSDKDIVALSGGHTLGKARPERSGFDGAWTKDPLKFDNSYFIELLKENSEGLLKLPTDKALVEDPTFRRYVELYAKDE

SEQ ID NO: 739 - protein, 76 aa, Solanum lycopersicum
AALKVLVEKMGVPDSKARCKIRDAQIVSSYLIDRNTVKLGCCDWWMKRSKRVATLEFDRVRKSMGVIVREPNGSNR

SEQ ID NO: 740 - protein, 76 aa, Zea mays
WPEGVPESASVQAILDWQRRTMEMMYTDIAQALEANGIEANPKDYLTFFCLGNREVKQEGEYEPEEHPEPDTDYIR

SEQ ID NO: 741 - protein, 276 aa, Solanum lycopersicum
EAGKAEMPTSTDPDILVRLKYLEKENAALKIELVSCSEVLEIRTIERDLSTQAAETASKQQLESIKKLTKLEVECRKLQAMARKSSPFNDQRSSAVSSFYVDSVTDSQSDSGERLNTVDNDALKMSKLETREYEPSCSNSWASALIAELDQFKNEKAMPKTLAACSIEIDMMDDFLEMEQLAALSETANKTPSVTSDAVPHDSPNIENPLAAEYNSISQRVVELEQKLEKIEAEKAELENAFNESQDALKVSSLQLKETQTRLEGLQKELDVVNES

SEQ ID NO: 742 - protein, 76 aa, Zea mays
VIVPKDSPQPTMLRILKGQSSVIHVRMKRHAMSEMPKSDEDVSKWCKDIFVAKDALLDKHLATGTFDEEIRPIGRP

SEQ ID NO: 743 - protein, 176 aa, Zea mays
RLAGSDLAHGIGERDVVYMQEENLASGTLVLSSSGAAAQRTVVRFVKLPLVERIPPYTTWIFLDKNQRMADDQSVVGRRRIYYDPVGNEALICSDSDEEIPEPEEEKHFFTEGEDQLIWRATQEHGLNREVVNVLCQFIDSTPSEIEERSEVLFEKNEKNSGSSDKIERQLSLDKT

SEQ ID NO: 744 - protein, 176 aa, Solanum lycopersicum
MGSLCSRNKHYSQADDEENTQTAEIERRIEQETKAEKHIQKLLLLGAGDSGKSTIFKQIKLLFQTGFDEEELKNYIPVIHANVYQTTKILHDGSKELAQNELEASKYLLSAENKEIGEKLSEIGGRLDYPHLTKDLVQDIEALWKDPAIQETLLRGNELQVPDCAHYFMENLERFS

SEQ ID NO: 745 - protein, 101 aa, Zea mays
NFMGNEFGHPEWIDFPRGPQRLPSGKFIPGNNNSYDKCRRRFDLGDADYLRYHGMQEFDQAMQHLEQKYEFMTSDHQYISRKHEEDKVIVFEKGDLVFVFN

SEQ ID NO: 746 - protein, 101 aa, Zea mays
VLSGVVFQPFEEIKGELALVPQSPDRSLARHKFVDDCEAAINEQINVEYNASYAYHSLFAYFDRDNVALKGFAKFFKESSDEEREHAEKLMEYQNKRGGRV

SEQ ID NO: 747 - protein, 176 aa, Oryza sativa
PNLEVKFVDPDTGRSLPANTPGELCVRSQSVMQGYYKRKEETERTVDGKGWLHTGDVGYIDGDGDVFIVDRIKELIKYKGFQVAPAELEAVLLSHPSVEDAAVFGVPDEEAGEVPVACVVRRHGAEEGEEEIVAYVAERVASYKRVRVLHIVDAIPKSVSGKILRRQLRDEFIKRM

SEQ ID NO: 748 - protein, 76 aa, Zea mays
TGELISHKEADKRGKIYDRANSSFLFDLNDQYVLDAYRKGDKLKFANHSSNPNCYAKVMLVAGDHRVGIYAKEHIE

SEQ ID NO: 749 - protein, 151 aa, Oryza sativa
RSSLVEKSRQKPEERMSVLSDVLKRSNYDSEPMLNSCGISIARGFTQVAGRVLQAPKLKAGNGEDLFARNGRWNFNNKRLIKASSIEKWAVVNFSARCNIRDLVRDIIKCGGMKGIKVEDPFDVIEEDPSMRRAPAARRVDGMIDKMQKKL

SEQ ID NO: 750 - protein, 276 aa, Oryza sativa
NDNIAIVEDPRTGDVSLPGATVVEVRDQKSFVDLLRIGEAHRVAANTKLNTESSRSHALLMVNVRRAVKGKHEMDVSISGENGHSSSMVGSLRPPIVRKSKLVVVDLAGSERIDKSGSEGHTLEEAKSINLSLSALGKCINALAENSPHVPVRDSKLTRLLKDSFGGTARTSLVVTIGPSPRHRGETTSTIMFGQRAMKVENMVKLKEEFDYKSLCRRLDIELDKLIAENERQRKYFDDEIERITAEAQLRVTEAEREYKISLENEKAKYHQEYLD

SEQ ID NO: 751 - protein, 226 aa, Oryza sativa
QEDRVEFFVSLPVALARCSVVKEDTGHMLDKQKLKTFKVNVRLVSKLCGEDLNKYLNEDKDGIPLPQDYLHALDVVLREGAMESSILVGRSLYARSMGEARDIGGGAVGLRGFFQRLRPTKQGLALNVDLSLSAFHESTGIISYLQKRCDFLKDLPQKKTRALAEEEHREVEKALKNIRVFVCHRETNQRYHVHSLTKETTENLKFRDRSGKDLMVVDYFKEHYNH

SEQ ID NO: 752 - protein, 76 aa, Zea mays
NKLIKEIRSDVSEVVAADEFEYKDPVDGSVSKHQGIRYLFGDGSRLVFRLSGTGSVGATIRVYIEQYEKDSSKTGR

SEQ ID NO: 753 - protein, 76 aa, Zea mays
NKLVKEIRSDVSEVVAADEFEYKDPVDGSVSKHQGIRYLFGDGSRLVFRLSGTGSVGATIRVYIEQYERDSSKTGR

SEQ ID NO: 754 - protein, 126 aa, Zea mays
REKGNIRSMTLVGTSGSKIISSVSAEESTTPPSADTSETENASSDMPPSSLRKYKISKRGPRYRERSPGKRQKVFTSDISFASNILNKLSIPEIRDTRLESREPGGDKLQILDESTKKTSSKDICG

SEQ ID NO: 755 - protein, 176 aa, Solanum lycopersicum
VKDLTGSYKIRYHANGLDNEPIEIDFTPPFRKIDMLSELEKVANISIPRDLSSESANKHLVDVCEKFDVKCPPPHTTTRLLDKLVGHFIEVNCINPTFIINHPEIMSPLAKSRRSEPGLTERFNLFVNRRELCDAYTELNDPTAQRERFAEQLKDRQLGDDEAMDLDESFITALEY

SEQ ID NO: 756 - protein, 76 aa, Solanum lycopersicum
EKVVELTGLSAEEAKGKSLVHDLLYKESQESAEKLLYNALRGVEGKNVEIKLRTFGAEQVEKAVFLVVNACSSRDY

SEQ ID NO: 757 - protein, 76 aa, Solanum lycopersicum
RLTEVRKNGTCAWLRPDGKTQVTVEYSNDNGAMVPIRVHTVLISTQHDETVTNDEIARDLKEHVIKPVIPEKYLDE

SEQ ID NO: 758 - protein, 76 aa, Solanum lycopersicum
TKNKAADSVEWAAIRARCHYVNKKWLGGMLTNWSTTETRLHKFRDLRMEQKTGRLNRLPKRDAAMLKRQLSRLQTY

SEQ ID NO: 759 - protein, 126 aa, Zea mays
GHVRDKLYNTRERARHLLASGVSEISAESSFTSIEEFLEPLELCYKSLCDCGDKAIADGSLLDLLRQVFTFGLSLVKLDIRQESERHTDVIDAITTHLGIGSYREWPEDKRQEWLLSELRGKRPLL

SEQ ID NO: 760 - protein, 176 aa, Zea mays
AAKALSKHDPPIVLAKVDANEEKNRPLATKYEIQGFPTIKIFRDRGKNIQEYKGPREADGIVDYLKKQVGPASKEIKSPEDATALIDDKKIYIVGIFAEFSGTEFTNFMEVAEKLRSDYDFGHTLHANHLPRGDAAVERPLVRLLKPFDELVVDSKDFDVAALMKFIDASTIPRVV

SEQ ID NO: 761 - protein, 151 aa, Zea mays
ALSSSGATAQRTIVRFVKLPLVEKIPPYTTWIFLDKNQRMADDQSVVGRRRIYYDTVGNEALICSDSDEEIPEPEEEKHFFTKGEDHLIWRATQDHGLNQEVVNVLCQFIGATPSEIEERSEVLFEKNEKHSGSSDKIESRLSLDKTMDAV

SEQ ID NO: 762 - protein, 76 aa, Solanum lycopersicum
ADKNPIRQVVFPDELENGILQVVGQTRSALSFARFAIRHRKRYDSVEEIKQRFEIFLDNLKMIRSHNRKGLSYKLG

SEQ ID NO: 763 - protein, 101 aa, Solanum lycopersicum
SCFLKTKIKDYFKTLGIFHSELKHKKLQSYRINQWKNWLRWHYQYDLSQIRWSRLMPKKWRTRVNQSCMAQNKNRNLNKWNSYEKDQLLHYKKENDSELYS

SEQ ID NO: 764 - protein, 101 aa, Zea mays
LIRSKFLEPLEEWMAKNRFGRFSSLVETAIDLAQLENGEYRISPLYSSDLGVLKDELSVVENHINNLHVDTASDLDLSVDKQLKLEKGSLGHVFRMSKKEE

SEQ ID NO: 765 - protein, 126 aa, Oryza sativa
VAVEVTGGPTVEFIPGRRDSSVCPREGRLPDAKKGALHLRDIFYRMGLSDKDIVALSGGHTLGRAHPERSGFEGAWTQEPLKFDNSYFLELLKGESEGLLKLPTDKALLEDPSFRRYVDLYARDED

SEQ ID NO: 766 - protein, 76 aa, Solanum lycopersicum
MAVVAPTAREENVYMAKLADRAESDEEMVEFMEKVSNSLGSEELTVEERNLLSVAYKNVIGARRASWRIISSIEQK

SEQ ID NO: 767 - protein, 76 aa, Zea mays
MGKDTIADLLTSIRNADMNKKGTVRVVSTNITENIVKILLREGFIESVRKHQESNRYFLVSTLRHQRRKTRKGIYR

SEQ ID NO: 768 - protein, 76 aa, Zea mays
FNVETVEYKNISFTVWDVGGQDKIRPLWRHYFQNTQGLIFVVDSNDRDRVVEARDELHRMLNEDELRDAVLLVFAN

SEQ ID NO: 769 - protein, 76 aa, Oryza sativa
SPSDLNPLDVIRKKRRRGSEDPVVLSTAPEDEPTHWHQTILYFPDPIEVKQDQIIEGSVKVSQSEENPRFLNIQLD

SEQ ID NO: 770 - protein, 101 aa, Oryza sativa
RSIARAPSQRARSSSPAQRPPSENTIPTKRADKRSESPIPRTTPLTRSGSLPQKPSLLKTSSVRVQMHTSEHKKLASVRSQADRNDDKEGEQTPKKGKKFL

SEQ ID NO: 771 - protein, 176 aa, Zea mays
CYLRFPQWREGFKEMHDDGLAGGATYTMESGTASQRVDVNVMYESEDSNRQKGNIRSMTLVGTSGSKIISSVSAEESTTTPSADISETENVSSDLPPSSLRKHKISKHGPRYREHSPGKRQKVFTSDISFEGNIMNKLSIPEIRDTRLESRESGGDKLRILDESTKKTSRKDMCGE

SEQ ID NO: 772 - protein, 151 aa, Solanum lycopersicum
TVSIHPISSDPGCDMVPKDEPDMDSSNKISFLNKNPFFDLFHLFHDRNRGGYTLHYDFASEERFQEMADLFTLSITEPDLVYHKGFAFSIDSCGLDQKQFLNEARDESKKKSLLVLPPIFYEENESFSRRIRKKWVRISCGNDLEDPKPKI

SEQ ID NO: 773 - protein, 126 aa, Solanum lycopersicum
TRFCNDDTKKEYVPKMYDPLLNGLYRGTIKKGVSSSIINNTLLENWEKRVRLNRIHTIFLPNIDYQEFEQKAYTIDKKPLSTEIDEFLTLINELGNEAKSSLNLKGLSLFSDQEQRRANSEKRTKF

SEQ ID NO: 774 - protein, 76 aa, Oryza sativa
DYTVEALVSTVDHLGFVSYKVDNLVKERSDEVNETEFRVSSVEQRVRICQQTIDQEGRSQQSLLIRAPKYHRRYIL

SEQ ID NO: 775 - protein, 76 aa, Oryza sativa
FNVETVEYKNISFTVWDVGGQDKIRPLWRHYFQNTQGLIFVVDSNDRERVVEARDELHRMLNEDELRDAVLLVFAN

SEQ ID NO: 776 - protein, 76 aa, Oryza sativa; identical to SEQ ID NO: 775

SEQ ID NO: 777 - protein, 126 aa, Zea mays
KIGIQNTNNEQMAWNLKHLTGGTVILRNKDFIILYRGKDFLPGGVAQTVIQREAQVHDEQVKEEEARLKAVDSLQMVGELSEESSLGTFREYQGFHAKFVHENTENSNTMIELEAEKYRLEKELKD

SEQ ID NO: 778 - protein, 101 aa, Zea mays
LVSRATAAFWEPQCPTYSEEPSSSPSGRANETGEAAADDGTFAFEELDHNNGMDIEAMTAAGGHGQEEELRLREAEALSDDASLEHITKEIEEFYSLCDEM

SEQ ID NO: 779 - protein, 76 aa, Solanum lycopersicum
IARRVWRDYYAKVDAVVYLVDANDRERFPEAKKELDGLLSDESLTNVPFLILGNKIDIPYAASEDELRYHLGLTGV

SEQ ID NO: 780 - protein, 76 aa, Solanum lycopersicum
GGKKVNNRWVEPGKFFREKMLKSGTIMPMPDIKDKMPKRSFLPRVIASKLPFSTSKIAELKKIFHAGDESQVEKMI

SEQ ID NO: 781 - protein, 276 aa, Zea mays
EPVEDDVCAEEPDEEELAMGEEEAEEQAMQEEVVAVAAGSPGKKRVGRRNAAAAAGDHEPEFIGSPVAADEARSNWPKRYGRSTAAKKPDEEEELKARCHYRSAKVDNVVYCLGDDVYVKAGENEADYIGRITEFFEGTDQCHYFTCRWFFRAEDTVINSLVSISVDGHKHDPRRVFLSEEKNDNVLDCIISKVKIVHVDPNMDPKAKAQLIESCDLYYDMSYSVAYSTFANISSENGQSGSDTASGISSDDVDLETSSSMPTRTATLLDLYSGCG

SEQ ID NO: 782 - protein, 101 aa, Zea mays
PGMMDTVLNLGLNDEVAAGLAAKSGERFAYDSFRRFLDMFGNVVMDIPRSLFEEKLEHMKESKGLKNDTDLTASDLKELVGQYKEVYLSAKGEPFPSDPKK

SEQ ID NO: 783 - protein, 76 aa, Zea mays
EFPEDSRFTNVESALVALGCKECLLPADCEKSIDLNPLQDVISNCNVLLTEKKKADFKSRDLAQDLGRIIRGSVEP

SEQ ID NO: 784 - protein, 126 aa, Solanum lycopersicum
DQFMTHYVLLLSSFKEQLQQHVRVHAMEAVMACWELEQSLQSLTGVAPGEGTGATMSDDDDDQADSDTNFLDGGFDGPDSMGFGPLVPTESERSLMERVRQELKHELKQGYKEKIVDIREEILRKR

SEQ ID NO: 785 - protein, 76 aa, Solanum lycopersicum
PLFIVEKQRLMIKKKDIQTLQQRESPDEGGWHDLVAKGYIEYIDTEEEETTMISMTINDLVQARLNPGDAYSDTYT

SEQ ID NO: 786 - protein, 101 aa, Solanum lycopersicum
MDKSKRPFLKFKRSFRRRLPPIQSGDRIDYRNMSLISRFISEQGKILSRRVNRLTLKQQRLITLAIKQARILSLLPFLNNEKQFERTESTARTTGFKARNK

SEQ ID NO: 787 - protein, 126 aa, Solanum lycopersicum
TSLFPAKYSMEMSAAAYKDWVFPEQALPADLLKRGVAVEDLSSPHGIRLLILDYPYAVDGLEIWAAIKSWVTEYCKFYYKSDETVEKDTELQAWWKELREEGHGDKKDEAWWPKLQTRQELRDCCT

SEQ ID NO: 788 - protein, 76 aa, Zea mays
YMLKHGTTMDEACEKIKELTEDSWKDMMELYLTPTEHPKLIAQTIVDFARTADYMYKETDGFTFSHTIKDMIAKLF

SEQ ID NO: 789 - protein, 76 aa, Zea mays
YMLKHGTTMDEACEKVKELTEDSWKDMMELYLTPTEHPKLIAQTIVDFARTADYMYKETDGFTFSHTIKDMIAKLF

SEQ ID NO: 790 - protein, 76 aa, Oryza sativa
RMRSQTHRKEIIEQLDVMAGELLEEFLKEVGKLPSRIIFFRDGVSETQFYKVLKEEMHAVRTTCSRYPGYKPLITF

SEQ ID NO: 791 - protein, 76 aa, Zea mays
EVVNVLCQFIGATPSEIEERSEVLFEKNEKHSGSSDKIESRLSLDKTMDAVLDSFDNLFCRRCLVFDCRLHGCSQN

SEQ ID NO: 792 - protein, 176 aa, Zea mays
ARHGAEMSAAEAEAIKAKIVAHPQYSALLAAYLDCQKVGAPPDVLERLTAMAAKLDASAAGRHEPRDPELDQFMEAYCNMLVKYREELTRPIDEAMEFLKRVEAQLDCISGGGGSSSARLSLADGKSEGVGSSEDDMDPNGRENDPPEIDPRAEDKELKYQLLKKYSGYLSSLRQE

SEQ ID NO: 793 - protein, 76 aa, Zea mays
MASTKAPGPGEKHHSIDAQLRQLVPGKVSEDDKLIEYDALLVDRFLNILQDLHGPSLREFVQECYEVSADYEGKGD

SEQ ID NO: 794 - protein, 76 aa, Zea mays
LGLAGDLLKKHYRIAPFDERYEQEASRKLVFSELYEASKQTKNPWVFEPEYPGKSRIFDGRTGDPFEQPVLIGKSY

SEQ ID NO: 795 - protein, 76 aa, Zea mays
LTSSVLKNFVIPKLEKVIDEEKEVSHSSLMDDAEKAILDPLKVKVKLKPDNVDICYPPVFQSGGKFDLKPGASSND

SEQ ID NO: 796 - protein, 151 aa, Oryza sativa
SIVHGSFEVRIVDAKDVSSYFLKGEPVLGACCRTNVGGFHITDFLRQLLSLKYPYHSASITWEKAEELKKEHCYVALDYMSELQIFKNNKEEAEEKTRYWQLPWVPPPVEEPPSEEELARKAALKEKAGQRLRDMAAAKRSQKIAELEKQL

SEQ ID NO: 797 - protein, 201 aa, Zea mays
MEEAVTMAPAAVSSAVVGDPMEYNAILRRKLEEDLEAFKMWRADSSVVTSDQRSQGSNNHTGGSSIRNNPVQNKLMNGEDPINNNHAQTAGLGVRLATSSSSRDPSPSDEDMDGEVEILGFKMPTEERVRKKESNRESARRSRYRKAAHLKELEDQVAQLKAENSCLLRRIAALNQKYNDANVDNRVLRADMETLRAKVKM

SEQ ID NO: 798 - protein, 176 aa, Zea mays
YTYGHHPPRCQAEGCKADLSSAKRYHRRHKVCEHHSKAPVVVTAGGLHQRFCQQCSRFHLLDEFDDAKKSCRKRLADHNRRRRKSKPSDADAGDKKRAHANKAAAAKDKAESSSKNMDIGDGLGAQILGSALLSKEQDQTMDLGEVVKEAVDPKGKASMQQHYGFPFHSSSAGSCF

SEQ ID NO: 799 - protein, 151 aa, Solanum lycopersicum
LDFCDYFLTGVAEYQKLITRNPIFLERVEGVGIIGRDEALNWGLSGPMLRASGIEWDLRKVDHYESYDEFDWQVQWQREGDSLARYLVRIGEMTESIKIIQQALEGIPGGPYENLEMRRFDRLKDPEWNDFEYRFISKKPSPTFELSKQEL

SEQ ID NO: 800 - protein, 176 aa, Zea mays
DIDCLIACGELDNENAEVRKARRLKIPIVREGYIGECVKKNKMLPFDLYKLENALESSKGSTVTVKVKGRSAVHESSGLQDTAHILEDGKSIYNATLNMSDLALGVNSYYVLQIIEQDDGSECYVFRKWGRVGSEKIGGQKLEEMSKTEAIKEFKRLFLEKTGNSWEAWECKTNFR

SEQ ID NO: 801 - protein, 226 aa, Zea mays
PGFYMPINVKDQKLLQALIENRKRSAPYAGAFLVKDEEGTDPNIVTGSDSAKSIDDLKGKDLLKRLHEVGTLAQITSIQGDHVVLLGHRRLRITEMVEEDPLTVKVDHLKEKPYNKDDDVMKATSFEVISTLREVLRTSSLWKDHVQTYTQHIGDFNYQRLADFGAAISGANKLLCQEVLEELDVYKRLKLTLELVKKEMEISKLQQSIAKAIEEKISGDQRRYLL

SEQ ID NO: 802 - protein, 76 aa, Oryza sativa
LNFSVFYYEILNSPDKACNLAKQAFDEAISELDTLGEESYKDSTLIMQLLRDNLTLWTSDLTEDGGDEVKEASKGD

SEQ ID NO: 803 - protein, 101 aa, Zea mays
LVSRATAAFWEPQCPSSSPSGRANETGEAAADDGTFAFEELDHNNGMDDIEAMTAAGGHGQEEELRLREAEALSDDASLEHITKEIEEFYSLCDEMDLQAL

SEQ ID NO: 804 - protein, 201 aa, Solanum lycopersicum
KKEDNKRKEQARIAIEEAWDTIPLAQIIRGYMLITQSILRKYILLPALIIAKNIGRMLFLQLPEWSEDLQEWNREMQIKCTYNGVQLSETEFPKNWLRDGIQIKILFPFCLKPWHISKLYPSRRELMKKQKQKDDFCFLTVWGMEAELPFGSPRKRPSFFEPIFKELEKKIGKFKKKYFLTLKILKGKTKLFRKVSKETTK

SEQ ID NO: 805 - protein, 176 aa, Solanum lycopersicum
VDSVTDSQSDSGERLNTVDNDALKMSKLETREYEPSCSNSWASALIAELDQFKNEKAMPKTLAACSIEIDMMDDFLEMEQLAALSETANKTPSVTSDAVPHDSPNIENPLAAEYNSISQRVVELEQKLEKIEAEKAELENAFNESQDALKVSSLQLKETQTRLEGLQKELDVVNES

SEQ ID NO: 806 - protein, 76 aa, Zea mays
GRVVDPYRNRLGSEIVEALICTKDWVAASRKGATYFPTMIGDLEVLDSVIAAATNHENHMDEDEDAIEFSKNNEDV

SEQ ID NO: 807 - protein, 76 aa, Solanum lycopersicum
FEKCKKEPSHWETISTGGLKRIQEKYTWQIYSERLLTLAAVYGFWKHVSKLDRLEIRRYLEMFYALKYRKMAEAVP

SEQ ID NO: 808 - protein, 126 aa, Solanum lycopersicum
KNNRFEQAVRTEMSQYFFDTCKSDGKQKISFTYPPSLSTFWKMIKRKIPLLSLQKTLPNELDTQWVSTNKEKSNNLNKEFLNRLEILDKESLSLDILETRTRFCNDDTKKEYVPKMYDPLLNGLYR

SEQ ID NO: 809 - protein, 176 aa, Oryza sativa
MAPSDDLVYMAKLAEQAERYDEMVEAMNSVAKLDEGLTKEERNLLSVGYKNLIGAKRAAMRIIGSIELKEETKGKESHVRQTAEYRRKVEAEMDKICCDVINIIDKYLIPHSSGAESSVFYYKMKGDYYRYLAEFKTGTEKIEVSELSLNAYETASKTAQTDLTPTDPIRLGLALN

SEQ ID NO: 810 - protein, 76 aa, Oryza sativa
SQSATGSLHGAQHNPVAADILRKEPEHETFSRINITAVETPSPDEIEAYKVLQKCLELREKYMFREEVAPWEKEII

SEQ ID NO: 811 - protein, 226 aa, Solanum lycopersicum
SLLCLVDTLQNLGVHRHFKSEIKKALDEIYRLWQQKNEQIFSNVTHCAMAFRLLRMSYYDVSSDELAEFVDEEHFFATNGKYKSHVEILELHKASQLAIDHEKDDILDKINNWTRAFMEQKLLNNGFIDRMSKKEVELALRKFYTTSHLAENRRYIKSYEENNFKILKAAYRSPNINNKDLLAFSIHDFELCQAQHREELQQLKRWFEDYRLDQLGLAERYIHASY

SEQ ID NO: 812 - protein, 251 aa, Zea mays
PSGRVTYIVVLEGLCRFSVQELSARGPYHVARVSRLDMTKTELEQAEQDPDLIALSRQFKATAMELISVLEQKQKTVGRTKVLLDTVPVYRLADIFVASFEISFEEQLSMLDSVHLKVRLSKATELVDRHLQSILVAEKITQKVEGQLSKSQKEFLLRQQMRAIKEELGDNDDDEDDVAALERKMQNAGMPANIWKHAQREMRRLRKMQPQQPGYSSSRAYLELLADLPWQKVSEERELDLRVAKESLDQD

SEQ ID NO: 813 - protein, 276 aa, Zea mays
EVVNVLCQFIGATPSEIEERSEVLFEKNEKHSGSSDKIESRLSLDKTMDAVLDSFDNLFCRRCLVFDCRLHGCSQNLVFPCEKQPYSFDPDENKKPCGHLCYLRFPQWREGFKEMHDDGLAGGATYTMESGTASQRVDVNVMYESEDSNRQKGNIRSMTLVGTSGSKIISSVSAEESTTTPSADISETENVSSDLPPSSLRKHKISKHGPRYREHSPGKRQKVFTSDISFEGNIMNKLSIPEIRDTRLESRESGGDKLRILDESTKKTSRKDMCGE

SEQ ID NO: 814 - protein, 201 aa, Zea mays
CQEPPQDGKQKRMPQRRRSSRLNQGSCEIRGVSQNTLHENPVVPVAPSTLSLEKQYGQTTGKHMKSLQNECSATVHEVIMASEFEKTEINELPQKTDLKEIPEACSSETEVQSHKIGDKAFNSKQNHLTGSQSSLSFNTVDTPEPPEDNTVKRCSKKRSSIEDVNAKLDTITSEPLRHEKKRKSRRKISARLNSVSSEHTD

SEQ ID NO: 815 - protein, 101 aa, Zea mays
LFDDWASKQGLALFDRRNTGVGMVFLPQDEKSMEEAKAATEKVFVDEGLEVLGWRPVPFNVSVVGRNAKETMPNIQQIFVKVAKEDNADDIERELYISRKL

SEQ ID NO: 816 - protein, 76 aa, Oryza sativa
KQFLDGRLPVYDGRKSIYTAGPLPFKTKDFVVKHINPLRGNQREEEYKVTIKQASKTDLYSLKQFLVGRQRELPQD

SEQ ID NO: 817 - protein, 76 aa, Solanum lycopersicum
PKCLSGYSSMSRLFTEREKQMINHLFPEEIEEFLGNPTRSVRSFFSDRWSELHLGSNPTERSTRDQKLLKKQQDLS

SEQ ID NO: 818 - protein, 101 aa, Zea mays
RPDNIKMFVLDEADEMLSRGFKDQIYDIFQLLPSKIQVGVFSATMPPEALEITRKFMNKPVRILVKRDELTLEGIKQFYVNIDKEDWKLDTLCDLYETLAI

SEQ ID NO: 819 - protein, 151 aa, Oryza sativa
ENRVKVFHKRSDELKVRDDLDSPADILVSEILDSELLGEGLIPTLQQAYDMLLAKNPKIVPYRATTYGQLVESTFLWKLHDLHNNEANAADGVWLTPGEMERIVSVKPQQHAMQCDALEDEIRLLSEPFKVFEFDFWKRPDSHREANIKIR

SEQ ID NO: 820 - protein, 76 aa, Solanum lycopersicum
MSGRGKGGKGLGKGGAKRHRKVLRDNIQGITKPAIRRLARRGGVKRISGLIYEETRGVLKIFLENVIRDSVTYTEH

SEQ ID NO: 821 - protein, 101 aa, Oryza sativa
CGHLHALEIPQLEGKVPWGDDVYLKPFLEDDSLLHSLSVFDDDDEDDCGMPMEKGGCSAGNGSLAETCESNLKSIINDGSDVIDRFERTCTIESTDGECSG

SEQ ID NO: 822 - protein, 101 aa, Oryza sativa
NKSDAPAASSEPSPHETQSRQVRSCTKVIMQGMAVGRAVDLTRLHGYDDLRCKLEEMFDIQGELSASLKKWKVVYTDDEDDMMLVGDDPWPEFCSMVKRIY

SEQ ID NO: 823 - protein, 101 aa, Zea mays
GKPRKAGRLAMVAGGSGITPIYQVIQAVLRDQPEDKTEMHLVYANRTEDDILLRAELDRWAAEYPERLKVWYVVSQVKRLDEWKYSVGIVTEAVLRDDVPE

SEQ ID NO: 824 - protein, 151 aa, Zea mays
AEAHNDSTEEANNRHSATDGYDSSRKEEFVNENLCKQEVYLRSWKAIEQGLLVKGLEIFGRNSCLIARNLLGGMKTCKDVFQYMNYIENNSASGALSGVDSLVKGYIKGTELRTRSRYFRRRGKVRRLKYTWKSAGYNFKRITERKDQPCR

SEQ ID NO: 825 - protein, 76 aa, Zea mays
QMAMDKMVEGRLRKYFEEVVLMEQKYVLNDSTNIKTVLNDLSKEVGSKVTIGNFIRMEVGEGIERTEAADGLEVAG

SEQ ID NO: 826 - protein, 76 aa, Solanum lycopersicum
VDSVTDSQSDSGERLNTVDNDALKMSKLETREYEPSCSNSWASALIAELDQFKNEKAMPKTLAACSIEIDMMDDFL

SEQ ID NO: 827 - protein, 76 aa, Zea mays
MVKLRLKRCGRKQQAIYRIVAIDVRSRREGRDLRKVGFYDPIKNQTCLNVPAILYFLEKGAQPTRTVYDILRKAEF

SEQ ID NO: 828 - protein, 76 aa, Oryza sativa
RYLDYRTTLNKHQLDTLKNELKGQRVTVNHRRTKQKYIVKGLTDKPASQITFVDSESGQTKKLLDYYSQQYGKVIE

SEQ ID NO: 829 - protein, 201 aa, Zea mays
MGQKINPLGFRLGTTQNHHSFWFAQPKNYSEGLQEDKKIRNCIKNYIQKNRKKGSNRKMESDSSSEVITHIEIQKEIDTIHVIIHIGFPNLLKKKGAIEELEKDLQKEVNSVNQRLNIAIEKVKEPYRQPNILAEYIAFQLKNRVSFRKAMKKAIELTKKADIKGIKIQIAGRLAGKEIARAECIKKGRLPLQTIRAKIDY

SEQ ID NO: 830 - protein, 151 aa, Solanum lycopersicum
MPGMEAENSNASRAEELKQLANEAFKGHKYSQAIDLYTQAIELNGENAVYYANRAFAHTKLEEYGSAIQDGTRAIEIDPRYSKGYYRRGAAYLAMGKFKDALKDFQQVKKLCPNDPDATKKLKECEKAVMKLKFEEAISVPESQRRSVADS

SEQ ID NO: 831 - protein, 276 aa, Solanum lycopersicum
IQIKILFPFCLKPWHISKLYPSRRELMKKQKQKDDFCFLTVWGMEAELPFGSPRKRPSFFEPIFKELEKKIGKFKKKYFLTLKILKGKTKLFRKVSKETTKLFIKSIGFLKKIKKELSKVNLIVLFRFKEISESNETKKEKDYLISNQIINESFRQIESGNWPNSSLIETKMKDLTNRTSTIKNKIERITKEKKKVTPEIDINPNKTNNIKKFESPKKIFQILKSRNTRVIWKFHYFLKLFIQRLYINLFLSIINIPRITTQLFLKSTNKLIEKFI

SEQ ID NO: 832 - protein, 76 aa, Solanum lycopersicum
MEQQHRNQKSMQDQNDEIEDVQHGPFPVEQLQASGIAALDVKKLKDAGLCTVESVVYAPRKELLQIKGISEAKVDK

SEQ ID NO: 833 - protein, 101 aa, Solanum lycopersicum
YEHPKAEGRFICSSHHAIIYDVAKMVRQKWPEYYVPTEFKGIDKDLALVSFSSKKLMDIKFQFKHTLEDMYKGAIETCRQKQLLPFSTRSTADNGKDKEAI

SEQ ID NO: 834 - protein, 76 aa, Solanum lycopersicum
GLLRFSEKWNEKPRHRVVVSCHLQPRKAAHSDRRVQLKVSCSPQNVQASVLESGCFSASIDEIETLKNKAEEVEEY

SEQ ID NO: 835 - protein, 126 aa, Solanum lycopersicum
MDMEDEYEPQYNVDDDEEEITQEDAWAVISAYFEEKGLVRQQLDSFDEFIQNTMQEIVDESADIEIRPESQHNPGHQSDFAETIYKINFGQIYLSKPMMTESDGETATLFPKAARLRNLTYSAPLY

SEQ ID NO: 836 - protein, 76 aa, Zea mays
LLVDPHDQNAIADALLKLVADKNLWQECRRNGLRNIHLYSWPEHCRTYLTRVAGCRLRNPRWLKDTPADAGADEEE

SEQ ID NO: 837 - protein, 101 aa, Zea mays
LVTAMESQVETISRRLQEELDAIPKAKKLVQRSLKEEEKLQHMLANLPSGMRKNDFANQHEQSSSRMLPHFNSSFTEANECELKIKDEPVAAPRKGRAPAP

SEQ ID NO: 838 - protein, 176 aa, Solanum lycopersicum
MGRGRVELKRIEGKINRQVTFAKRRNGLLKKAYELSVLCDAEVALIIFSNRGKLYEFCSSSSMLKTLERYQKCNYGAPEPNISTREALEISSQQEYLKLKGRYEALQRSQRNLLGEDLGPLNSKELESLERQLDMSLKQIRSTRTQLMLDQLTDYQRKEHALNEANRTLKQRLMEG

SEQ ID NO: 839 - protein, 101 aa, Zea mays
KSDRGVSLIASLCEKHHTSEDELSKALEKTNTLIMDILKKKPCPATSACQQDNLSFIDPEGLTVFKDLLQGDSLKPSLIILEKEYENAINTKGELDERMFA

SEQ ID NO: 840 - protein, 151 aa, Zea mays
WQQTRKLMNTHLLSNKKVYSFRHGREEEVCLVVDNLREAAAKSPSTAVDMSEVLAAYTNDVVSRSVLGSTHRKKGRNTLFREMTMTNVDLLVGFNLEYYIPRWPLTDLLFRLVCWKVTRHLKRWDALLEEVIHEHVEMRKLSGDKEKESDD

SEQ ID NO: 841 - protein, 76 aa, Zea mays
DHNGLLIGDDEHCWSDNGVSNIEGGCYAKCIDLAQEKEPDIWNAIKFGTVLENVVFDEHTREVDYADYSVTENTRA

SEQ ID NO: 842 - protein, 126 aa, Solanum lycopersicum
KGDYYRYLAEFKAGDDRKEASEQSLKAYEAATATASSDLAPTHPIRLGLALNFSVFYYEILNSPERACHLAKQAFDEAIAELDSLSEESYKDSTLIMQLLRDNLTLWTSDLEEGGEHSKGDERQGE

SEQ ID NO: 843 - protein, 101 aa, Oryza sativa
SPPSVAFDGKLQQDALEEDECSDPSKTVKPLDGAQHDSAREKHQSCPDGTKNIQSKQQNGSSRSCKKVHKQGIALGRSIDLTKFTCYDELIAELDQMFDFN

SEQ ID NO: 844 - protein, 101 aa, Zea mays
IPGRTGRARAAVSVPPPAGEQVPTERLEPRVEERAGGYWVLKEKYRAGLNPQEKVKLEKEPMALFMEGGIQDLARVPMEQIDAAKLTKDDVDVRLKWLGLF

SEQ ID NO: 845 - protein, 76 aa, Oryza sativa
KAERGKVGIYNVGTGKGRSVKEFVEACKKATGVDIKVDYFPRRPGDYAEVYSDPAKINSELNWTAQHTDLLESLRV

SEQ ID NO: 846 - protein, 76 aa, Zea mays
QIKTLRRQVASRESERAERATLVTQEKLQIGSNRMKMMRLSDVWIRPAFGGRGRKLTGNLEAHFNGFRYSTSRSDE

SEQ ID NO: 847 - protein, 76 aa, Oryza sativa
AEHKDGRGIYCLFEGGTPDSRLDWGPHMICRDDPYGDGTGNPDTGADFAAAPDIDHLNKRVQRELIGWLDWLKMDI

SEQ ID NO: 848 - protein, 276 aa, Zea mays
EKTEPVVDDVCAEEPDEEELAMGEEEAEAEEQAMQEVVAAVAAGSPGKKRVGRRSAAASGDHVPEFIGSPVAAAEAHSNWPKRYERSTAANKPEEDDELKARCHYRSAKVDNIVYCLGDDVYVKAGENEADYIGRITEFFEGTDRCHYFTCRWFFRAEDTVINSLVSINVDGHKHDPRRVFLSEEKNDNVLDCIISKVKIVHVDPNMDPKAKAQLIEHCDLYYDMSYSVAYSTFANISSENGQSGSETASGISSDDAGLETSSNMPERTATLLDLY

SEQ ID NO: 849 - protein, 276 aa, Zea mays
EKTEPVVDDVCAEEPDEEELAMGEEEAEAEEQAMQEVVAAVAAGSPGKKRVGRRSAAASGDHVPEFIGSPVGAAEAHSNWPKRYERSTAANKPEEDDELKARCHYRSAKVDNIVYCLGDDVYVKAGENEADYIGRITEFFEGTDRCHYFTCRWFFRAEDTVINSLVSINVDGHKHDPRRVFLSEEKNDNVLDCIISKVKIVHVDPNMDPKAKAQLIEHCDLYYDMSYSVAYSTFANISSENGQSGSETASGISSDDAGLETSSNMPERTATLLDLY

SEQ ID NO: 850 - protein, 101 aa, Solanum lycopersicum
MAALIPENLSREQCLYLAKLAEQAERYEEMVQFMDKLVLNSTPAGELTVEERNLLSVAYKNVIGSLRAAWRIVSSIEQKEESRKNEEHVHLVKEYRGKVEN

SEQ ID NO: 851 - protein, 76 aa, Solanum lycopersicum
QQALEGIPGGPYENLEMRRFDRLKDPEWNDFEYRFISKKPSPTFELSKQELYVRVEAPKGELGIFLIGDQSVFPWR

SEQ ID NO: 852 - protein, 76 aa, Solanum lycopersicum
MAEKPEVLDAVLKETVDLENIPIEEVFENLRCTREGLTATAAQERLSIFGYNKLEEKKESKFLKFLGFMWNPLSWV

SEQ ID NO: 853 - protein, 76 aa, Zea mays
RIKSIVIPKDLLLKCFSCLWMSKTKKISLVRWESCRDKIIKVYMRYTDDISSDEGVSRWLEYKNNLEFASDPVWSS

SEQ ID NO: 854 - protein, 76 aa, Zea mays
HGRWGDSRNPSYGALTDHQFTRPRGRGKKLQEEWAVPLKSVEDISERFTNFCQGKLTSSPWSELDGLQPETKIIDD

SEQ ID NO: 855 - protein, 76 aa, Solanum lycopersicum
LNEARDESKKKSLLVLPPIFYEENESFSRRIRKKWVRISCGNDLEDPKPKIVVFASNNIMEAVTQYRLIRNLIQIQ

SEQ ID NO: 856 - protein, 76 aa, Oryza sativa
YQRMDPLPEQERFEINYRDFLQSPLQPLMDNLEAQTYETFEKDTVKYTQYQRAIAKALVDRVSDDDVSTTKTVLMV

SEQ ID NO: 857 - protein, 176 aa, Solanum lycopersicum
IWLDNVWLVNKDRFFSKVQNVSSNIQYDSTRSSFVQVTDSSQLKGSSDQSRDHLDSISNEDSEYHTLINQREIQQRKERSILWDPSFLQTERKEIESGRFPKCLSGYSSMSRLFTEREKQMINHLFPEEIEEFLGNPTRSVRSFFSDRWSELHLGSNPTERSTRDQKLLKKQQDLS

SEQ ID NO: 858 - protein, 76 aa, Solanum lycopersicum
SEGAIIEDSLLMGADYYETDAERKLLAAKGSVPIGIGKNCLYKRAIIDKNARIGDNVKIINKDNVQEAARETDGYF

SEQ ID NO: 859 - protein, 176 aa, Oryza sativa
PTSSEVGEVQNLLQNEKVLRQSAEDEANDLKNQVLHWKKMEAAATAEVVKLRKMLDTEASQKEKLDEEIAVLKSQLLQLSLDADETRRSLDRGDGSGKIFPGFDSLMSHSRNSQPREQSNGPKPPIAKLFEQVGLQKILSLLESEEPDVRVHAVKVVANLAAEEANQEKIVEAGGL

SEQ ID NO: 860 - protein, 176 aa, Zea mays
MKLDRGYISPYFITNSKAQKCELEDPLILIHDKKVTNMHAVVKVLEMALKKQRPLLIVAEDVESEALGTLIINKLRAGIKVCAVKAPGFGENRKANLQDLAILTGGEVITEELGMNLENVEPHMLGSCKKVTVSKDDTVILDGAGDKKSIEERADQIRSAVENSTSDYDKEKLQER

SEQ ID NO: 861 - protein, 76 aa, Solanum lycopersicum
MDFQSDLTREISPQRKLGRGKIEIKRIENTTNRQVTFCKRRNGLLKKAYELSVLCDAEVALVVFSNRGRLYEYANN

SEQ ID NO: 862 - protein, 176 aa, Solanum lycopersicum
MDFQSDLTREISPQRKLGRGKIEIKRIENTTNRQVTFCKRRNGLLKKAYELSVLCDAEVALVVFSNRGRLYEYANNSVKATIERYKKACSDSSNTGSVSEANAQYYQQEASKLRAQIGNLMNQNRNMMGEALAGMKLKELKNLEQRIEKGISKIRSKKNELLFAEIEYMQKREVDL

SEQ ID NO: 863 - protein, 276 aa, Zea mays
SHMLNLANLAEEVQIAYRRRIKLKKGDFADENSAITESDIEETLKRLVVDLKKSPAEVFDALKSQTVDLVLTAHPTQSVRRSLLQKHSRIRNCLVQLYSKDITPDDKQELDEALQREIQAAFRTDEIRRTQPTPQDEMRAGMSYFHETIWKGVPKFLRRVDTALKNIGINERVPYNAPLIQFSSWMGGDRDGNPRVTPEVTRDVCLLARMMASNLYCSQIEDLMFELSMWRCSDELRMRADVLHLSTKKDAKHYIEFWKKVPPNEPYRVILSDVRD

SEQ ID NO: 864 - protein, 276 aa, Zea mays
ATRGNPRPPSQTSRPVLAPPLANGWQWQSRPRPSGSEVKKDDAPPSGSVPEVENVDGNNTSDDDDDDDDDLSDDISDDYDSDASEKSFETRKTNKWFKEFFEVLNTLSLEQINEQTRQWHCPACKNGPGAIDWYKGLQPLVSHARTKGSTRVKLHRELAALLEEELSRRGTSVLPAGEQFGKWKGLQESTDREIVWPPMVIVMNTFLEKDEDDKWKGMGNQELLDYFGEYEASKARHAYGPSGHRGMSVLIFESSAVGYMEAERLHKHFVNQGTDR

SEQ ID NO: 865 - protein, 76 aa, Zea mays
SASSVGEGQILQGTLMRTSSLPAVIEASGNDDWKKRKEAQSLKRLEVKKKRIERRNSLACNTSKEAAGQSPKEMNA

SEQ ID NO: 866 - protein, 176 aa, Solanum lycopersicum
MENFPIINLEKLNGDERANTMEMIKDACENWGFFELVNHGIPHEVMDTVEKMTKGHYKKCMEQRFKELVASKGLEAVQAEVTDLDWESTFFLRHLPTSNISQVPDLDEEYREVMRDFAKRLEKLAEELLDLLCENLGLEKGYLKNAFYGSKGPNFGTKVSNYPPCPKPDLIKGLRA

SEQ ID NO: 867 - protein, 151 aa, Zea mays
ISVRAYSEGSIDLNQASIPTKDESLNYLKGALIKYSDINNLEIPKMGRRSKRRYQSYIPVDKTEMKNKTLFFVADLETLLLKRRDTDVDKTHVPYAGGYMMVDMEKWVNADHITTFYAHDYSKVCQDFHDMSEKMLTEMINRIVKDVQRRG

SEQ ID NO: 868 - protein, 176 aa, Zea mays
LSSASSVPEVKLSQYISALEKLTTLRVLQQASCIFKSIKIDMLSRMIPFFDFSVVEKISVDAAKQNFVAIKVDHLSGVVQFGTVDIESDGLSDHLSVLADSLNKARIHICPPVKKPSKLGESLISLAAIVENEHKRLLARKSIIEKRKEELERQILEKEKEEEKKRMSSQKKTVDE

SEQ ID NO: 869 - protein, 126 aa, Zea mays
SLKKALLLGDAISDLPKVQNHQPNDVMEYGGSPKTEFQRYIRLSRKDMLDWSFGEGAGPDEGKLLDHQPLRLNNDDYERVQQIPVKKGANFRDLKGVRVGANNIVEWDPEIERVKLSSGKPLVPDY

SEQ ID NO: 870 - protein, 176 aa, Zea mays
LRTYDHVFSSRPRSLVSDIIMYGATDSCFAPYGDHFRKARKLVTVHLLNASKVRSQRPAREEEVRGALDRVRRAAAAREPVDMSELLHSFVNNLVCRAVSGKFSMEEGRNRLFRELTDINAGLLGGFHIQDYFPRLGRIELVRKVACAKTRRVRKRWDDLLDKLIDDHAARMATHQ

SEQ ID NO: 871 - protein, 176 aa, Solanum lycopersicum
MENFPIINLENLNGDERAKTMEMIKDACENWGFFELVNHGIPHEVMDTVEKLTKGHYKKCMEQRFKELVASKGLEAVQAEVTDLDWESTFFLRHLPTSNISQVPDLDEEYREVMRDFAKRLEKLAEELLDLLCENLGLEKGYLKNAFYGSKGPNFGTKVSNYPPCPKPDLIKGLRA

SEQ ID NO: 872 - protein, 76 aa, Oryza sativa
MANSSSGVAIHDDCKLKFNELQSKRMHRFITFMMDNKGKEIIVDKIGDRTTSYEDFTSSLPEGDCRFAIYDFDFLT

SEQ ID NO: 873 - protein, 76 aa, Solanum lycopersicum
RRTVKGKVYYLIKWRGWPESANTWEPETNLSSCTDIIDAYEESLKSGKLRRRKRKFGATQTHPMIKQQRRFSAPVA

SEQ ID NO: 874 - protein, 226 aa, Zea mays
DIGHSKGKYYSLNVPLDDGIDDESYQSLFKPIMGKVMEVFRPGAVVLQCGADSLSGDRLGCFNLSIKGHAECVRYMRSFNVPLLLLGGGGYTIRNVARCWCYETGVALGQEPEDKMPVNEYYEYFGPDYTLHVAPSNMENKNTRQQLDDIRSKLSKLRHAPSVHFQERVPDTEIPEQDEDQDDPDERHDPDSDMEVDDHKAVEESSRRSILGIKIKREFGENATRV

SEQ ID NO: 875 - protein, 76 aa, Oryza sativa
IESGKTLSISEDLVDTDNVHNKPLSSRRETLSDDEYTPVGDPIKKYKVEVQASGEAIYVDDIPAPKNCLYGEFIYS

SEQ ID NO: 876 - protein, 76 aa, Solanum lycopersicum
LTLEDVPNHGKVHFVCNSWVYPSFRYKSDRIFFANQPYLPSETPELLRKYRENELVTLRGDGTGKREAWDRIYDYD

SEQ ID NO: 877 - protein, 126 aa, Zea mays
FNVVVEITKGSKVKYELDKKTGLIKVDRVLYSSVVYPHNYGFVPRTLCEDNDPMDVLVLMQEPVVPGSFLRARAIGLMPMIDQGEKDDKIIAVCADDPEYRHYNDISELSPHRLQEIKRFFEDYKK

SEQ ID NO: 878 - protein, 251 aa, Solanum lycopersicum
PKCLSGYSSMSRLFTEREKQMINHLFPEEIEEFLGNPTRSVRSFFSDRWSELHLGSNPTERSTRDQKLLKKQQDLSFVPSRRSEKKEMVNIFKIITYLQNTVSIHPISSDPGCDMVPKDEPDMDSSNKISFLNKNPFFDLFHLFHDRNRGGYTLHYDFASEERFQEMADLFTLSITEPDLVYHKGFAFSIDSCGLDQKQFLNEARDESKKKSLLVLPPIFYEENESFSRRIRKKWVRISCGNDLEDPKPKI

SEQ ID NO: 879 - protein, 151 aa, Oryza sativa
TDCIPEVSVSTAGTATENEKSGQQAQQSSKDVQSKTQVASTRSCTKVHKQGVALGRSVDLSKFSNYDELKAELDKMFEFDGELVSSNKNWQIVYTDNEGDMMLVGDDPWEEFCSIVRKIYIYTKEEVQKMNSKSNAPRKDDSSENEKGHLP

SEQ ID NO: 880 - protein, 76 aa, Zea mays
QGEDVVAGIRTPEDLDAMKNLMPQAYDELVENCNILESHYKEMQDIEFTVQENRLWMLQCRTGKRTGKSAVKIAVD

SEQ ID NO: 881 - protein, 226 aa, Zea mays
SAKKPTFLRLRGLFEDEISSCNHSISPFFSTPGFATFRNREIATGAGAIREQLADLDLRIIIENSLVEWKELEDEGYSGDEWEDRKRRIRKVFLIRRMQLAKHFIQTNVEPEWMVLCLLPVLPPELRPIVYRSGDKVVTSDINELYKRVIRRNNNLAYLLKRSELAPADLVMCQEKLVQEAVDTLLDSGSRGQPTRDGHNKVYKSLSDVIEGKEGRFRETLLGKRV

SEQ ID NO: 882 - protein, 201 aa, Solanum lycopersicum
GKDYHDMQVELYADYDPKMLLTFLRSSQHYTLEKAYEICVKKDLLKEQVFILGRMGNAKQALAVIINRLGDIEEAIEFVSMQQDDELWEELIQQSFHKPEMVGVLLEHTVGNLDPLYIVNMLPNDLEIPRLRDRLVKIVTDYRTETSLRHGCNDILKADCVNLLVKYYKEAKRGVCLSDEVDDVSSRRGEKSVSHLGERTM

SEQ ID NO: 883 - protein, 176 aa, Solanum lycopersicum
MSLRPNSRTEARRSRYKVAVDAEEGRRRREDNMVEIRKNKREENLLKKRREGLLQAQQFPSTAAVSHLDKKLETLPELIAGVWSDDSSLQLECTTQFRKLLSIERNPPIEEVIQSGVVPRFVEFLARDDYPQLQFEAAWALTNIASGTSENTKVVIDYGSVPIFIRLLSSPSDDVR

SEQ ID NO: 884 - protein, 76 aa, Zea mays
SARIRVVKLRGSSPDCTHCGENSVFTEEDFQKFDYESFTQSPMSDKAAPSVNVLPESARITCREYKKLADDGEPHL

SEQ ID NO: 885 - protein, 176 aa, Zea mays
TLFKCLKKFFDLTELLSGTQYSTANLFYKGFCEIKDLIDQWCCHEKFVIRRMAVAMSEKFEKYWKVSNIALAVACFLDPRYKKILIEFYMKKFHGDSYKVHVDDFVRVIRKLYQFYSSCSPSAPKTKTTTNDSMDDTLMENEDDEFQNYLHELKDYDQVESNELDKYMSEPLLKHS

SEQ ID NO: 886 - protein, 76 aa, Oryza sativa
RDIGGGAVGLRGFFQRLRPTKQGLALNVDLSLSAFHESTGIISYLQKRCDFLKDLPQKKTRALAEEEHREVEKALK

SEQ ID NO: 887 - protein, 101 aa, Oryza sativa
KKMAEDIILDFSKSKKADMAVMILRYFNVIGSDPEGRLGEAPKPELREHGRISGACFDAALGIIPGLKVKGTDYETPDGTCVRDYIDVTDLVDAHVKALNK

SEQ ID NO: 888 - protein, 76 aa, Solanum lycopersicum
VKDLTGSYKIRYHANGLDNEPIEIDFTPPFRKIDMLSELEKVANISIPRDLSSESANKHLVDVCEKFDVKCPPPHT

SEQ ID NO: 889 - protein, 151 aa, Oryza sativa
RSIPITGKDVTQFIQQLLKERGEHIPPEESFDVARRVKEMYCYTCSDIVKEFNKHDREPNKYIKHWSGIKPKTGAKYTCDIGYERFLGPEIFFHPEIYNNDFTTPLHVVIDKCIQSSPIDTRRALYKNIVLSGGSTMFKDFHRRLQRDLKK

SEQ ID NO: 890 - protein, 151 aa, Solanum lycopersicum
DHADIMAISSSAHAIVKSACSNTLHPELCYSAIVNVSDFSKKVTSQKDVIELSLNITVKAVRRNYYAVKELIKTRKGLTPREKVALHDCLETMDETLDELHTAVEDLELYPNKKSLKEHVEDLKTLISSAITNQETCLDGFSHDEADKKVR

SEQ ID NO: 891 - protein, 126 aa, Zea mays
MGIKGLTKLLADNAPKAMKEQKFESYFGRKIAVDASMSIYQFLIVVGRTGMETLTNEAGEVTSHLQGMFNRTIRLLEAGIKPVYVFDGKPPDMKKQELAKRYSKRDDATKDLTEAVEVGDKDAIEK

SEQ ID NO: 892 - protein, 126 aa, Zea mays
VPPADLMETVRQKLKINKKQFLRCWEILVFLSLDSQDHKSMDNFRACIYDRMKGEILGSASGTNRKRLLQMPTSFNKEASFAVYWTQEIEDEDEQTVEQQPEDLKTQEQQLNELVDIQIEEIAGVA

SEQ ID NO: 893 - protein, 101 aa, Zea mays
VEPGACDQSFGIHVAEFANFPEAVVALAKSKAAELEDFSTTPTFSDDLKDEVGSKRKRVFSPDDITRGAARARLFLEEFAALPMDEMDGSKILEMATKMKA

SEQ ID NO: 894 - protein, 76 aa, Oryza sativa
MAPTSTFPVINMELLAGEERPAAMEQLDDACENWGFFEILNHGISTELMDEVEKMTKDHYKRVREQRFLEFASKTL

SEQ ID NO: 895 - protein, 76 aa, Solanum lycopersicum
VWVDEFEAMDLLDCLDATWSGAAVYIDDNTAKDLHRPYGRVNRKQLKSKMMQKCIMNGVKFHQAKVIKVIHEESKS

SEQ ID NO: 896 - protein, 251 aa, Solanum lycopersicum
IGHILFMKWLGLVLVWIRQNHSIRSNKYIRSNKYLVLELRNSMARIFSILLFITCVYYLGRIPSPILTKKLKEASKTEERVESEEERDVEIETASEMKGTKQEQEGSTEEDPYPSPSLFSEEGWDPDKIDETEEIRVNGKDKIKDKFHSHLTETGYNNINTSNSPIYDYQDSYLNNNNTGNLENCKLQLLDKKNENQEQDLFWFQKPLVSLLFDYNRWNRPFRYIKNNRFEQAVRTEMSQYFFDTCKSDGK

SEQ ID NO: 897 - protein, 76 aa, Oryza sativa
GRLNPETYQLFDKVEKHYGIRIEYMFPDAGEVQALVRAKGLFSFYEDGHQECCRARKVRPLRRALRGLRAWITGQR

SEQ ID NO: 898 - protein, 76 aa, Solanum lycopersicum
ASSGGYLIDEFMNDQVHGWTDEYDESIKDRCRLALEIVEAVANEIGADKIGIKLSPFDGKKDSNSEALATYMANEL

SEQ ID NO: 899 - protein, 201 aa, Zea mays
MTKTYRISSGLLREAVKKITIARDSAFFVDKEILSKSSELKNSLINPCHNVVREFVRESRDCDSDDYKREYRLNDYRLELTQPPSNISRGVIVVKTVRRWELINQKYNADLWIPPAKKGVVITPDIIDKLYLFWDNFLGSYEKEGINRKQNTDPVSKGKVFDLLASRSSNNTNQTPEELREIQTQIEHLTIHFDEGSVHES

SEQ ID NO: 900 - protein, 151 aa, Solanum lycopersicum
VKNLALMVYITVGSAAYPILEFLEEWGTENFEEISPAVIPQATKIFVNGTWVGIHRDPDMLVRTLRRLRRRVDVNTEVGVVRDIRLKELRIYTDYGRCSRPLFIVEKQRLMIKKKDIQTLQQRESPDEGGWHDLVAKGYIEYIDTEEEETT

SEQ ID NO: 901 - protein, 76 aa, Oryza sativa
YMPGRLYDLDASKYGTEAELKSLIEAFHDKNVECLADIVINHRCADYKDSRGVYCVFEGGTPDGRLDWGPDMICSD

SEQ ID NO: 902 - protein, 276 aa, Zea mays
DIDCLIACGELDNENAEVRKARRLKIPIVREGYIGECVKKNKMLPFDLYKLENALESSKGSTVTVKVKGRSAVHESSGLQDTAHILEDGKSIYNATLNMSDLALGVNSYYVLQIIEQDDGSECYVFRKWGRVGSEKIGGQKLEEMSKTEAIKEFKRLFLEKTGNSWEAWECKTNFRKQPGRFYPLDVDYGVKKAPKRKDISEMKSSLAPQLLELMKMLFNVETYRAAMMEFEINMSEMPLGKLSKENIEKGFEALTEIQNLLKDTADQALAVRESL

SEQ ID NO: 903 - protein, 76 aa, Zea mays
GGSVREQDRFLPIANISRIMKKAIPANGKIAKDAKETVQECVSEFISFITSEASDKCQREKRKTINGDDLLWAMAT

SEQ ID NO: 904 - protein, 101 aa, Solanum lycopersicum
MVGVLLEHTVGNLDPLYIVNMLPNDLEIPRLRDRLVKIVTDYRTETSLRHGCNDILKADCVNLLVKYYKEAKRGVCLSDEVDDVSSRRGEKSVSHLGERTM

SEQ ID NO: 905 - protein, 76 aa, Oryza sativa
FLSCIKFLVSINPESKSRATNREVLNELIKLHGKTSLGGKLPAYDGRKSLYTAGSLPFESEEFVVKLIDPEKKDKE

SEQ ID NO: 906 - protein, 226 aa, Solanum lycopersicum
KNNRFEQAVRTEMSQYFFDTCKSDGKQKISFTYPPSLSTFWKMIKRKIPLLSLQKTLPNELDTQWVSTNKEKSNNLNKEFLNRLEILDKESLSLDILETRTRFCNDDTKKEYVPKMYDPLLNGLYRGTIKKGVSSSIINNTLLENWEKRVRLNRIHTIFLPNIDYQEFEQKAYTIDKKPLSTEIDEFLTLINELGNEAKSSLNLKGLSLFSDQEQRRANSEKRTKF

SEQ ID NO: 907 - protein, 76 aa, Solanum lycopersicum
PKNYSEGLQEDKKIRDCIKNYVQKNMRTSSGIEGIARIEIQKRIDLIQVIIFMGFPKLLIESRPRGIEELQMTLQK

SEQ ID NO: 908 - protein, 276 aa, Zea mays
VSTEESRKLALYNDGFVQSYELSSDKCLVTCKNVRSLDLLKLSSDRPTYAAVQISAAVTGYARIRMHPFISRDDCYYTDTDSVVVERELPEEEVSPTALGKFKHEHFVEYGIFLAPKSYMLKASSVDQPIIKFKGAGKDEADEEWFINQLADPRAKKVISYVRKFSRNFRELLVQEKMCKYTMGLESKKREYVFDKNGVWVDTKPCHIGDFDVKSINPTSYWIIMNLLEENEDLRNEFSNSEIMIANWEIKADAAKKRKASKLRGKPLRGGDTPSH

SEQ ID NO: 909 - protein, 176 aa, Zea mays
EISKLQQSIAKAIEEKISGDQRRYLLNEQLKAIKKELGLETDDKTALSAKFRERIESKKDKCPPHVLQVIEEELTKLQLLEASSSEFSVTRNYLDWLTVLPWGNYSDENFDVHHAQKILDEDHYGLSDVKERILEFIAVGKLRGTSQGKIICLSGPPGVGKTSIGRSIARALNRQF

SEQ ID NO: 910 - protein, 276 aa, Zea mays
PEPEEEKHFFTEGEDQLIWRATQEHGLNREVVNVLCQFIDSTPSEIEERSEVLFEKNEKNSGSSDKIERQLSLDKTMDAVLDSFDNLFCRRCLVFDCRLHGCSQNLVFPTEKQPYSFEPDENKKPCGRQCYLRWRGGFQEIHDVGLSGCATYNMESGTVSHKVDVSIMSESEDSNREKGNIRSMTLVGTSGSKIISSVSAEESTTPPSADTSETENASSDMPPSSLRKYKISKRGPRYRERSPGKRQKVFTSDISFASNILNKLSIPEIRDTRLES

SEQ ID NO: 911 - protein, 76 aa, Solanum lycopersicum
TDAIPLEMIRELLRTDGEGILRFPTPLVIKDSKTAWRTDEEFAREMLAGVNPVIISRLEEFPPKSKLDPELYGNQN

SEQ ID NO: 912 - protein, 126 aa, Oryza sativa
MANSASGMAVGDECKLKFQELKSKRSFRFITFKIDERTQQVVVDRLGQPGDTYDDFTASMPASECRYAVFDFDFVTDENCQKSKIFFISWSPDTSKVRSKMLYASSKDRFKRELDGIQVELQATDP

SEQ ID NO: 913 - protein, 176 aa, Oryza sativa
TKRMNVAGRHITSYLVDLLSRRGYAMNKSADFETVREIKEKLCYLSYDYKREYQLGLETTILVKSYTLPDGRVIKVGTERFQAPEALFTPELIDVEGDGMADMAFRCIQEMDIDNRMTLYQHIVLSGGSTMYPGLPSRLEKEMLDRYLDVVLKGNKDGLKKLRLRIEDPPRRKHMV

SEQ ID NO: 914 - protein, 151 aa, Oryza sativa
FQLASATAIEEAGGPKIPMKYGRVDVTAAEQCPPEGRLPDAGPRVPADHLREVFYRMGLDDKEIVALSGAHTLGRSRPDRSGWGKPETKYTKDGPGEPGGQSWTVEWLKFDNSYFKDIKEQRDQDLLVLPTDAALFEDPSFKVYAEKYAED

SEQ ID NO: 915 - protein, 226 aa, Zea mays
MGIKGLTKLLADNAPKAMKEQKFESYFGRKIAVDASMSIYQFLIVVGRTGMETLTNEAGEVTSHLQGMFNRTIRLLEAGIKPVYVFDGKPPDMKKQELAKRYSKRDDATKDLTEAVEVGDKDAIEKLSKRTVKVTRQHNEDCKRLLRLMGVPVVEAPSEAEAECAALCINDKVFAVASEDMDSLTFGAPRFLRHLMDPSSKKIPVMEFDVAKVLEELELTMDQFID

SEQ ID NO: 916 - protein, 76 aa, Zea mays
AALSVSPYDKKYGAFETENEKERNMRLSNLVNFSLDNKRENREMPSRPYLLSELASKGVLSCASQEVRDLYNLLEH

SEQ ID NO: 917 - protein, 276 aa, Zea mays
SSSAAQVTSNSAVRAGEENAASLYVLSVIDSLKKRITADRLTYIKNRIGENKTNISSYTQRTYNLSKNRQISTSKGTDSASNLLTKRQDDALCTLHSLDIIPVDKDGGTFQDESPFSSSNVMFGGNLGPKNAIIRPIKLPEVPKLPPYTTWIFLDRNQRMTEDQSVLGRRRIYYDTSCGEALICSDSEDEAIEDEEEKKEFKHSEDHIIRMTVQECGMSDAVLQTLARHMERAADDIKARYEILHGEKTKDSCKKGTEHNVKVEDLYCDKDLDAAL

SEQ ID NO: 918 - protein, 151 aa, Zea mays
SKKRKNWVYVQRKKFLKSKEKYFVSVRPAVAYEMDEGINLATLFPQDLLQEEDNLQLRLVNFISHENSKLTQRIYHTNSQFVRTCLVVNWEQEEKEGARASLVEVKTNDLIRDFLRIELVKSTILYTRRRYDRTSVGLIPNNRLDRNNTNS

SEQ ID NO: 919 - protein, 76 aa, Oryza sativa
MSPAEPTREESVYKAKLAEQAERYEEMVEYMERVARAAGGASGGEELTVEERNLLSVAYKNVIGARRASWRIISSI

SEQ ID NO: 920 - protein, 176 aa, Zea mays
MDPKATSTSKTDNIDQITIIEEKVNKIGTEPTIRKYSKGRMLGKGGFAKCYEVTNLENKKVLAGKIICKASLTKSRAKQKLISEIKIHKSLRHSNIVEFEHVFEDQENVYILLELCPNQSLHDLIKRRKRLTEIEVQCYTLQLICGLKYLHSRRVIHRDLKLGNLLLNDKMELKIC

SEQ ID NO: 921 - protein, 76 aa, Zea mays
YTYGHHPPRCQAEGCKADLSSAKRYHRRHKVCEHHSKAPVVVTAGGLHQRFCQQCSRFHLLDEFDDAKKSCRKRLA

SEQ ID NO: 922 - protein, 201 aa, Solanum lycopersicum
EKDGLFCERIFGPIKSGICACGNYRVIGDEKEDPKFCEQCGVEFVDSRIRRYQMGYIKLACPVTHVWYLKRLPSYIANLLDKPLKELEGLVYCDFSFARPITKKPTFLRLRGLFEYEIQSWKYSIPLFFTTQGFDTFRNREISTGAGAIREQLADLDLRIIIENSLVEWEELGEEGHTGNEWEDRKVGRRKDFLVRRVELA

SEQ ID NO: 923 - protein, 126 aa, Zea mays
YKRAANRGKKGSQGLTGQAYTLMSSNSDVRVLRSTSSSKTTSTEHVQAPVQPAAKRRKMSRASNKSSTDEFSQIRKRVRYILNRMNYEQSLIEAYASEGWKNQSLDKIRPEKELERAKSEILRCKL

SEQ ID NO: 924 - protein, 101 aa, Oryza sativa
PDVTEVEKCSDPSKAMKPLDTPQPDSVPEKPSSQQASRNMSCKSQGVSTRSCKKVHKQGIALGRSVDLTKFNGYEELIAELDDMFDFNGELKGPKKEWMVV

SEQ ID NO: 925 - protein, 151 aa, Solanum lycopersicum
YLQSQICIDTSIISGSESNGDSYIYRAICSGQSLNSSENEGSSRRTRTKDSDLTIRESSNDLEVTQKYKHLWVQCENCYGLNYKKFLKSKMNICEQCGYHLKMSSSDRIELLIDPGTWDPMDEDMVSLDPIEFHSEEEPYKDRIDSYQRKT

SEQ ID NO: 926 - protein, 76 aa, Solanum lycopersicum
EPSKTAVKQGKWSLDSWKTKKALQLPEYPDEKELESVLKTLEMNPPLVFAGEARSLEEKLGEAALGKAFLLQGGDC

SEQ ID NO: 927 - protein, 76 aa, Zea mays
SVASLAASLLRDQRRIHPVSVLARGFHGIPDGTTSSSACPPRRPRRRPGRREMELTEEEAKRLRRSAKTIWENCQL

SEQ ID NO: 928 - protein, 126 aa, Zea mays
MGRGKIEIKRIENSTNRQVTFSKRRGGLLKKANELAVLCDARVGVVIFSSTGKMFEYCSPACSLRELIEQYQHATNSHFEEINHDQQILLEMTRMKNEMEKLETGIRRYTGDDLSSLTLDDVSDLE

SEQ ID NO: 929 - protein, 201 aa, Zea mays
EICKVRCRGVPTVDMKNLCYHLEEKSGGKVIHRVGGVVFLYRGRHYDPKTRPRYPLMLWKPATPVYPKLIKEAPDGFTKEEADEMRRKGRDLLPICKLAKNGIYITLVKDVRDAFEGSDLVKIDCEGLNPSDYKKIGAKLRDLVPCVLLSFDDEQILMHRGKEWKSRYSKPLTLIPKVPKNNLAMTSVMNSSDEVSDANTQ

SEQ ID NO: 930 - protein, 101 aa, Oryza sativa
KSDAPGTSSERSPLESQSRQVRSCTKVIMQGMAVGRAVDLTKLNGYGDLRSKLEEMFDIQGDLCPTLKRWQVVYTDDEDDMMLVGDDPWDEFCSMVKRIYI

SEQ ID NO: 931 - protein, 101 aa, Zea mays
MSARLRVADVRAELQRRGLDVSGTKPALVRRLDAAICEAEKAVVAAAPTSVANGYDVAVDGKRNCGNNKRKRSGDGGEEGNGDTCTDVTKLEGMSYRELQG

SEQ ID NO: 932 - protein, 126 aa, Zea mays
MIPNPLLDRMEIIAIAGYITDEKMHIARDYLEKNTRQACGIKPEQVEVTDTALLALIENYCREAGVRNLQKQIEKIYRKIALQLVRQGVSNEPDHESVSASVTEESGNGDNTTTKDEILKDPAVED

SEQ ID NO: 933 - protein, 276 aa, Oryza sativa
QTTKLIEYYKETYKKEIEHPMLPCLDLSKSKSKQNYVPIEFCNIPEGERYPVARLDDKKSDNKGEQEKPSTKTTLRKISIKVASSRKEEILDLVGNAQDGPCRGKIAQRFRISLDAAMMEVTGRILAPPTLELGTGTSRGQTFKFTIHQDDCQWNWKLKKYDKRVVAHGGTLNCWGVVDFSEGDLESKFIDKVVRKCSALGMVMTRKPCYEHVSNMEVLSDPKSLRDALIEAKRAAEEEDKKLQLLFCPMLNRCHGYKTLKLMCETELGIQTQCFL

SEQ ID NO: 934 - protein, 76 aa, Oryza sativa
AYRRTSSGPLPSAGGGGGRASSESGVSSRVRVAVRLRPRNADELAADADFGDCVELQPELKRLKLRKNNWESETYE

SEQ ID NO: 935 - protein, 101 aa, Oryza sativa
PFKVKSGSCGTVVRNAELKIVDPDTGTSLGRNQSGEICIRGEQIMKGYLNDPEATKNTIDEDGWLHTGDIGFVDDDDEIFIVDRLKEIIKYKGFQVPPAEL

SEQ ID NO: 936 - protein, 76 aa, Oryza sativa
SGNDSQPALRQHKLLSETSWDQFKIGKASTPGNATKPGNGGREVDRTSCRLFGFSLTEKIIPTDKDGEKEVSYETD

SEQ ID NO: 937 - protein, 76 aa, Oryza sativa
DLPSRQLKVKVQDRNSIVTTDAERRVCQPNGLQELIDGEISNYSHGRCFVRPSGTEDVVRVYAEASSEEAADCLAK

SEQ ID NO: 938 - protein, 76 aa, Zea mays
SREPGGDKLQILDESTKKTSSKDICGESPITTTENMGIESKKVSSTKNFLEHTLSCWSALERDLYLKGIEIFGKNS

SEQ ID NO: 939 - protein, 101 aa, Oryza sativa
TENLKFRDRSGKDLMVVDYFKEHYNHDIQFRNLPCLQIGRSKPCYVPMELCVVCEGQKFLGKLSDEQTSKILKMGCERPSERKGIIKGVVKGAFHARSDTY

SEQ ID NO: 940 - protein, 101 aa, Solanum lycopersicum
GKKVNNRWIEPGKFFREKMLKSGTIMPMPDIKDKMPKRSFLPRAIAAKLPFSTSKIDELKKIFHAANDSQVAKMIGDALSECERAPSPGETKQCVNSAEDM

SEQ ID NO: 941 - protein, 101 aa, Solanum lycopersicum
GNHDQIKFLVSQGCIKPLCDLLVCPDPRIVTVCLEGLENILKIGEADKDLGNTEGVNVYAQLIDEAEGLEKIENLQSHDNTEIYEKAVKILETYWLEEEDV

SEQ ID NO: 942 - protein, 126 aa, Zea mays
QYSTANLFYKGFCEIKDLIDQWCVHEKFVIRRMAVAMSEKFEKYWKVSNIALAVACFLDPRYKKILIEFYMKKFHGDSYKVHVDDFVRVIRKLYQFYSSCSPSAPKTKTTTNDSMDDTLMENEDDE

SEQ ID NO: 943 - protein, 201 aa, Zea mays
KVGKEGVITIADGNTLYNELEVVEGMKLDRGYISPYFITNSKTQKCELEDPLILIHDKKVTNMHAVVKVLEMALKKQKPLLIVAEDVESEALGTLIINKLRAGIKVCAVKAPGFGENRKANLQDLAILTGGEVITEELGMNLENFEPHMLGTCKKVTVSKDDTVILDGAGDKKSIEERAEQIRSAIENSTSDYDKEKLQER

SEQ ID NO: 944 - protein, 176 aa, Oryza sativa
QTTKLIEYYKETYKKEIEHPMLPCLDLSKSKSKQNYVPIEFCNIPEGERYPVARLDDKKSDNKGEQEKPSTKTTLRKISIKVASSRKEEILDLVGNAQDGPCRGKIAQRFRISLDAAMMEVTGRILAPPTLELGTGTSRGQTFKFTIHQDDCQWNWKLKKYDKRVVAHGGTLNCWG

SEQ ID NO: 945 - protein, 176 aa, Oryza sativa
SNIVALKGTQQSLKCTQKGLILCVDYSVLPCWKAGSVLDLVKTMKFMEYPLLEDQLKKLNNALKGLCVTVSHRKTEEKYTVKGLTDKPADQITFKDSKSGQTTKLIEYYKETYKKEIEHPMLPCLDLSKSKSKQNYVPIEFCNIPEGERYPVARLDDKKSDNKGEQEKPSTKTTLR

SEQ ID NO: 946 - protein, 151 aa, Solanum lycopersicum
TLEDVPNYGKIHFVCNSWVYPAFRYKSDRIFFANQAYLPSETPQPLRKYRENELVALRGDGTGKLEEWDRVYDYACYNDLGEPDKGEEYARPILGGSSEYPYPRRGRTGREPTKADPNCESRNPLPMSLDIYVPRDERFGHVKKSDFLTSS

SEQ ID NO: 947 - protein, 126 aa, Oryza sativa
MSNSASGMAVCDECKLKFLELKAKRSFRFIVFKINEKVQQVVVDRLGQPGESYDDFTACLPADECRYAVFDFDFVTDENCQKSKIFFISWAPDTSRVRSKMLYASSKDRFKRELDGIQVELQATDP

SEQ ID NO: 948 - protein, 176 aa, Oryza sativa
CELEKQLSRTTEEFASQISSLEERIADLISEKELVYEELKSTQEKMQQEMRHRQGLEDEILRLKQSLADNCSEESKALCGMVRSGSGLGSVPFMSKSGKSRELLSSQRSNISKIFEEVGLPNVLALLKSDELEVQIHAVKVVANLAAEDVNQEKIVEEGGLDALLSLLETSENTTI

SEQ ID NO: 949 - protein, 251 aa, Zea mays
AIVLAVKSSPLQWEELMKCASECDLDKSKGISYDVSTRWNSTYLMLRDALYYKPALIRLKTSDPRRYDAICPKAEEWKMALTLFKCLKKFFDLTELLSGTQYSTANLFYKGFCEIKDLIDQWCVHEKFVIRRMAVAMSEKFEKYWKVSNIALAVACFLDPRYKKILIEFYMKKFHGDSYKVHVDDFVRVIRKLYQFYSSCSPSAPKTKTTTNDSMDDTLMENEDDEFQNYLHELKDYDQVESNELDKYMSE

SEQ ID NO: 950 - protein, 151 aa, Solanum lycopersicum
KVYLCEKMSLVNEMYFSIILDRATAGPLIIACRKGGTSIEDLAEKFPDMIIKVPIDVFKGISDADAAKVVDGLAPKVADRNDSIEQVKKLYKLFCETDCTMLEINPLAETSDNKLVAADAKLNFDDNAAYRQKEIFSLRDSSQEDPREVAA

SEQ ID NO: 951 - protein, 76 aa, Solanum lycopersicum
HIDDKGTEVSYSCCPPVPDDIDSVPYYKFPPMTKLRIRPPAHAADEEYVAKYQLATSRMRELDKDPFDPLGFKQQA

SEQ ID NO: 952 - protein, 76 aa, Zea mays
GVYTTGNPYGIAEDIVFSMPCRSKGDGDYELASDVLMDDFLWERIKKSEAELLAEKKCVAHLTGEGNAFCDLPEDT

SEQ ID NO: 953 - protein, 76 aa, Zea mays
MDPKATSTSKTDNIDQITIIEEKVNKIGTEPTIRKYSKGRMLGKGGFAKCYEVTNLENKKVLAGKIICKASLTKSR

SEQ ID NO: 954 - protein, 76 aa, Oryza sativa
SPKLEMIDGLFKPQGAQEDDGLIRELLVDFYTSTGKRKPDQVIIFRDGVSESQFTQVLNIELDQIIEACKFLDENW

SEQ ID NO: 955 - protein, 76 aa, Oryza sativa
RADVPSIAAVVGSRCWPLISRYRASVRTQSPKVEMIDSLFKPLDDGKDDGIIRELLLDFYKTSQQRKPKQIIIFRD

SEQ ID NO: 956 - protein, 76 aa, Oryza sativa
LPDLGCIAFKKGVKIRWNLRREEYKLNMGDVASIISCWFRFNRRKLEALEAGIHELRPGQGDSPMFVDILVKDLRS

SEQ ID NO: 957 - protein, 76 aa, Oryza sativa
VKSGACGTVVRNAELKIVDPDTGLSLPRNQPGEICIRGKQIMKGYLNNPEATEKTIDKDGWLHTGDIGFVDDDDEI

SEQ ID NO: 958 - protein, 276 aa, Zea mays
MASWDNLGELSNIAQLTGLDAVKLISLIVRAASTARLHKRNCRRFAQHLKLIGGLLEQLRVSELRKYPETREPLEQLEDALRRGYLLVNSCQDRSYLYLLAMGWNIVYQFRKAQSEIDNYLRLVPLITLVDNARIRDRLEYIERDQCEYSFDEEDKKVQDALLNPDPCTNPTIVLKKTLSCSYPNLPFNEALRKESEKLQVELQRSQSNMDLGSCEVIQHLLGVTKTVESTIPEKETNVKAPEKKGSNYSESKGETAKSFDDDDDYPKKQNGDYPK

SEQ ID NO: 959 - protein, 151 aa, Solanum lycopersicum
VARLEEICATSATMGRSSSSSGGGIIGEDPALDQFMEAYCEMLTKYEQELSKPFKEAMVFLSRIECQFKALTLAPNSSHESALGEAMDRNGSSDEEVDVNNSFIDPQAEDRELKGQLLRKYSGYLGSLKQEFMKKRKKGKLPKEARQQLVD

SEQ ID NO: 960 - protein, 76 aa, Zea mays
LTFQKRFTNLKKNKKGIPLNCIFIDQLELPSRTYNCLKRANIHTLLDLLSKTEEDLMQINSFRMEDGKLIWDTLEK

SEQ ID NO: 961 - protein, 101 aa, Oryza sativa
EELGTRRYMGTITGISDLDPVRWKNSQWRNLQVGWDESAAGERRNRVSIWEIEPVAAPFFLCPQPFFGVKRPRQLDDESEMENLFKRAMPWLGEEVCIKDT

SEQ ID NO: 962 - protein, 201 aa, Solanum lycopersicum
MVGVLLEHTVGNLDPLYIVNMLPNDLEIPRLRDRLVKIVTDYRTETSLRHGCNDILKADCVNLLVKYYKEAKRGVCLSDEVDDVSSRRGEKSVSHLGERTMSLKSVEVKSKTRGGGRCCICFDPFSILNVSIIAFFCCHAYHTTCLMESSISVGGKKEAGVAAQRTTSYDEYPNGVNDDYEDEDEEEEEEEDATSGALPMR

SEQ ID NO: 963 - protein, 76 aa, Oryza sativa
DCQWNWKLKKYDKRVVAHGGTLNCWGVVDFSEGDLESKFIDKVVRKCSALGMVMTRKPCYEHVSNMEVLSDPKSLR

SEQ ID NO: 964 - protein, 226 aa, Zea mays
MAAPPKAWKAEYAKSGRASCKSCRSPIAKDQLRLGKMVQASQFDGFMPMWNHARCIFSKKNQIKSVDDVEGIDALRWDDQEKIRNYVGSASAGTSSTAAPPEKCTIEIAPSARTSCRRCSEKITKGSVRLSAKLESEGPKGIPWYHANCFFEVSPSATVEKFSGWDTLSDEDKRTMLDLVKKDVGNNEQNKGSKRKKSENDIDSYKSARLDESTSEGTVRNKGQLV

SEQ ID NO: 965 - protein, 76 aa, Oryza sativa
NFSARCDVRNLIRDLIRNASAKGIQMAEPFDVFEESPSLRRAPVSRRVDDMFEQIKSKLPGAPKFLLCLLPERKNC

SEQ ID NO: 966 - protein, 151 aa, Zea mays
YSGCGGMSTGLCLGAALSGLKLETRWAVDLNSFACQSLKYNHPQTEVRNEKADEFLALLKEWAVLCEKYVHQDVDSNLAGSEDQEDADTLDKDEFVVQKLIGIRYDGTGRKKGVYFKVQWEGYGPEEDTWEPIDNLSDCPLKIREFVQEGR

SEQ ID NO: 967 - protein, 226 aa, Zea mays
GISSDDAGLETSSNMPERTATLLDLYSGCGGMSTGLCLGAALSGLKLETRWAVDLNSFACQSLKYNHPQTEVRNEKADEFLALLKEWAVLCEKYVHQDVDSNLAGSEDQEDADTLDKDEFVVQKLIGIRYDGTGRKKGVYFKVQWEEYGPEEDTWEPIDNLSDCPLKIREFVQEGRKRKILPLPGDVDVICGGPPCQGISGFNRFRNRDEPLKDEKNKQMVTFMDI

SEQ ID NO: 968 - protein, 76 aa, Zea mays
NFNIVTDAEVVEKGAIKEKSDKEIMREIQAIMRQIASCITYLPCLDEPCVFDVLAYTDTDVDAPGTWVESDAKLID

SEQ ID NO: 969 - protein, 226 aa, Zea mays
YKRAANRGKKGSQGLTGQAYTLMSSNSDVRVLRSTSSSKTTSTEHVQAPVQPAAKRRKMSRASNKSSTDEFSQIRKRVRYILNRMNYEQSLIEAYASEGWKNQSLDKIRPEKELERAKSEILRCKLRIREVFRNIDSLLSKGKIDETLFDSEGEISCEDIFCSTCGSNDATLGNDIILCDGACDRGFHQNCLNPPLRTEDIPMGDEGWLCPACDCKIDCIDLINEL

SEQ ID NO: 970 - protein, 176 aa, Zea mays
DDVDLETSSSMPTRTATLLDLYSGCGGMSTGLCLGAALSGLKLETRWAVDFNSFACQSLKYNHPQTEVRNEKADEFLALLKEWAVLCKKYVQDVDSNLASSEDQADEDSPLDKDEFVVEKLVGICYGGSDRENGIYFKVQWEGYGPEEDTWEPIDNLSDCPQKIREFVQEGHKRKI

SEQ ID NO: 971 - protein, 176 aa, Oryza sativa
PKRPNYVPIELCHMVSLQRYTKALSSQQRATLVEKSRQKPQERMRVVTDAVKNNRYDDDPILSSCGIKIEKQLTRVDGRVLSAPTLVVGNSEDCIPNRGRWNYNNKRLFEPVKIERWAIVNFSARCDMSRISRDLINCGRTKGIIIERPFTLVDEDSQSRRCTPVVRVESMFEKVK

SEQ ID NO: 972 - protein, 76 aa, Zea mays
MGGRREAIERELKKLRAEREELDGRIRLLESQLEAGPAGFNGAAAGKGVGDDACGGSGACQSRVGNEFAPDGSLPA

SEQ ID NO: 973 - protein, 201 aa, Zea mays
EKDGLFCERIFGPIKSGICACGNSRASVRENEDERFCQKCGVEFVDSRIRRYQMGYIKLACPVTHVWYLKGLPSYIANLLDKPLKKLEGLVYGDFSFARPSAKKPTFLRLRGLFEDEISSCNHSISPFFSTPGFATFRNREIATGAGAIREQLADLDLRIIIENSLVEWKELEDEGYSGDEWEDRKRRIRKVFLIRRMQLA

SEQ ID NO: 974 - protein, 176 aa, Zea mays
SNLAGSEDQEDADTLDKDEFVVQKLIGIRYDGTGRKKGVYFKVQWEEYGPEEDTWEPIDNLSDCPLKIREFVQEGRKRKILPLPGDVDVICGGPPCQGISGFNRFRNRDEPLKDEKNKQMVTFMDIVAYLKPKYVLMENVVDILKFADGYLGKYALSCLVAMKYQARLGMMVAGCY

SEQ ID NO: 975 - protein, 101 aa, Zea mays
SRQCPCFAADRECDPDVCRNCWVGCGDGTLGVPNQRGDNYECRNMKLLLKQQQRVLLGRSDVSGWGAFLKNSVSKHEYLGEYTGELISHKEADKRGKIYDR

SEQ ID NO: 976 - protein, 76 aa, Zea mays
PEKCTIEIAPSARTSCRRCSEKITKGSVRLSAKLESEGPKGIPWYHANCFFEVSPSATVEKFSGWDTLSDEDKRTM

SEQ ID NO: 977 - protein, 101 aa, Zea mays
RKFSEQYARRSNTFFCADKTVTAVVIKGLADHRDTLGAPLCPCRHYDDKAAEVAQGFWNCPCVPMRERKECHCMLFLTPDNDFAGKDQVISFEEIKEATSK

SEQ ID NO: 978 - protein, 76 aa, Solanum lycopersicum
METFLFTSESVNEGHPDKLCDQVSDAVLDACLAQDPESKVACETCTKTNLVMVFGEITTKANIDYEKIVRDTCREI

SEQ ID NO: 979 - protein, 76 aa, Solanum lycopersicum
METFLFTSESVNEGHPDKLCDQISDAVLDACLEQDPESKVACETCTKTNLVMVFGEITTKAIVDYEKIVRDTCRNI

SEQ ID NO: 980 - protein, 201 aa, Zea mays
SLVKGYIKGTELRTRSRYFRRRGKVRRLKYTWKSAGYNFKRITERKDQPCRQYNPCGCQSTCGKQCPCLSNGTCCEKYCGCPKICKNRFRGCHCAKSQCRSRQCPCFAADRECDPDVCRNCWVGCGDGTLGVPNQRGDNYECRNMKLLLKQQQRVLLGRSDVSGWGAFLKNSVSKHEYLGEYTGELISHKEADKRGKIYDR

SEQ ID NO: 981 - protein, 76 aa, Solanum lycopersicum
METFLFTSESVNEGHPDKLCDQVSDAILDACLEQDPESKVACETCTKTNMVMVFGEITTKATVDYEKIVRDTCRGI

SEQ ID NO: 982 - protein, 151 aa, Solanum lycopersicum
MAIYKVALLLLFGMILLASDFEHAKACTKECDTRIDFGICPLLETKRVEGLCTNCCAGKKGCKYFSKDGTYICDGESEWVSEKNNNLKKACTKECDTRIDFGICPLLETKRVEGLCTNCCAGKKGCKYFSKDGTYICDGESEWVSEKDNNL

SEQ ID NO: 983 - protein, 76 aa, Zea mays
SLVKGYIKGTELRTRSRYFRRRGKVRRLKYTWKSAGYNFKRITERKDQPCRQYNPCGCQSTCGKQCPCLSNGTCCE

SEQ ID NO: 984 - protein, 76 aa, Oryza sativa
CDMSRISRDLINCGRTKGIIIERPFTLVDEDSQSRRCTPVVRVESMFEKVKANLPGPPEFLLCVLPERKNCDLYGP

SEQ ID NO: 985 - protein, 176 aa, Zea mays
AAMAKRPLLNKSISGDFAENEQDYMEQDMAARTRIYRRRGRNRKLKYTWKSAGHPTVRKRTDDGKQCYTQYSPCACQQMCGKDCPCADKGTCCEKYCGCSKSCKNKFRGCHCAKSQCRSRQCPCFAASRECDPDVCRNCWVSCGDGSLGEPLARGDGYQCGNMKLLLKQQQRILLG

SEQ ID NO: 986 - protein, 102 aa, Artificial Sequence
  Description of Artificial Sequence: Synthetic polypeptide
ALTVIDFTEDEVEDLLSIVASVLHLTVLSDLIPEIEYVVSIASYDEVEESLALTVIDFTEDEVEDLLSIVASVLHLNEIILQVCSGVDEQLGELVSGEEVVE

SEQ ID NO: 987 - protein, 100 aa, Gallus gallus
KVHKLQIEVENVTSLLNEAESKNIKLTKDVATLGSQLQDTQELLQEETRQKLNVTTKLRQLEDDKNSLQEQLDEEVEAKQNLERHISTLTIQLSDSKKKL

SEQ ID NO: 988 - protein, 100 aa, Bos taurus
EEEEEARRSLEKQLQALQAQLTDTKKKVDDDLGTIENLEEAKKKLLKDVEVLSQRLEEKALAYDKLEKTKTRLQQELDDLLVDLDHQRQIVSNLEKKQKK

SEQ ID NO: 989 - protein, 101 aa, Artificial Sequence
  Description of Artificial Sequence: Synthetic polypeptide
IKTVTSLDLPVLRWLKLSAEHGSLHKDGKLVSIIAELLSTKTDMVEKALLYRQKLQLEKVTAEAKIKKMEEEILLLKVTTEAKLKKLEEDVIVLEDQNLKL

SEQ ID NO: 990 - protein, 50 aa, Bos taurus
SISSSEEIVPNSVEQKHIQKEDVPSERYLGYLEQLLRLKKYKVPQLEIVP

SEQ ID NO: 991 - protein, 50 aa, Bos taurus
IVPNSVEQKHIQKEDVPSERYLGYLEQLLRLKKYKVPQLEIVPNSAEERL

SEQ ID NO: 992 - protein, 61 aa, Zea mays
MRECISIHIGQAGIQVGNACWELYCLEHGIQADGQMPGDKTIGGGDAEFDEGEDGDEGDEY

SEQ ID NO: 993 - protein, 50 aa, Bos taurus
LEYSREGLVWEDIDWIDNGECLDLIEKKLGLLALINEESHFPQATDSTLL

SEQ ID NO: 994 - protein, 51 aa, Gallus gallus
LQQQFNMHVFKLEQEEYMKEQIPWTLIDFYDNQPCINLIEAKMGVLDLLDE

SEQ ID NO: 995 - protein, 58 aa, Sus scrofa
LCINFANEHLQQFFVRHVFKLEQEEYDLESIDWLHIEFTDNQDALDMIANKPMNIISL

SEQ ID NO: 996 - protein, 101 aa, Sus scrofa
EDEDDKTVSDLAVVLFETATLRSGYLLPDTKAYGDRIERMLRLSLNIDPDAKVEEEPEEEPEETTEDTTEDTEQDDDEEMDAGADEEEQETSETSTAEKDE

SEQ ID NO: 997 - protein, 100 aa, Sus scrofa
DEDDKTVSDLAVVLFETATLRSGYLLPDTKAYGDRIERMLRLSLNIDPDAKVEEEPEEEPEETTEDTTEDTEQDDDEEMDAGADEEEQETSETSTAEKDE

SEQ ID NO: 998 - protein, 100 aa, Gallus gallus
NWIVDHVNKALHSTVKQHSFIGVLDIYGFETFEINSFEQFCINYANEKLQQQFNMHVFKLEQEEYMKEQIPWTLIDFYDNQPCINLIEAKMGVLDLLDEE

SEQ ID NO: 999 - protein, 101 aa, Sus scrofa
EVKNPRRSIGLLDIFGFENFAVNSFEQLCINFANEHLQQFFVRHVFKLEQEEYDLESIDWLHIEFTDNQDALDMIANKPMNIISLIDEESKFPKGTDTTML

SEQ ID NO: 1000 - protein, 201 aa, Bos taurus
ISLTDENALAGNEELTVKIKCDKEKNLLHVTDTGVGMTREELVKNLGTIAKSGTSEFLNKMTEAQEDGQSTSELIGQFGVGFYSAFLVADKVIVTSKHNNDTQHIWESDSNEFSVIADPRGNTLGRGTTITLVLKEEASDYLELDTIKNLVKKYSQFINFPIYVWSSKTETVEEPAEEEEAAKEDKEESDDEAAVEEEEDE

SEQ ID NO: 1001 - protein, 202 aa, Gallus gallus
TDENALAGNEELTVKIKCDKEKNMLHVTDTGIGMTKEELIKNLGTIAKSGTSEFLNKMTEMQDDSQSTSELIGQFGVGFYSAFLVADRVIVTSKHNNDTQHIWESDSNEFSVIDDPRGNTLGRGTTITLVLKEEASDYLELDTVKNLVKKYSQFINFPIYVWSSKTETVEEPVEEEEAKEEKEETDDNEAAVEEEEEEKKPK

SEQ ID NO: 1002 - protein, 51 aa, Bos taurus
KLLKDVEVLSQRLEEKALAYDKLEKTKTRLQQELDDLLVDLDHQRQIVSNL

SEQ ID NO: 1003 - protein, 52 aa, Saccharomyces cerevisiae
LIMKRNFLSWKRGLQLNYNVTRLEEWCKTHGLTDGTECLQHLIQTAKLLQVR

SEQ ID NO: 1004 - protein, 53 aa, Saccharomyces cerevisiae
LYLEEVSKNLVEINPLKLEVKAKPWFVYTPMHGVGFDIFSTIVKKTLCLVEGK

SEQ ID NO: 1005 - protein, 102 aa, Saccharomyces cerevisiae
LTLIYLNDLENETLKVFDKIYSTWLVKFMKHASAHIEIFDMVLNEKLFKNSGDEKFAKLFTFLNEFDAVLCKFQVVDSMHTKIFNDTLKYLNVMLFNDLITK

SEQ ID NO: 1006 - protein, 101 aa, Bos taurus
VLMRNVALPEDIRGKCTALLQLYDASNSEWQLGKTKVFLRESLEQKLEKRQEEEVTRAAMVIRAHVLGYLARKQYKKVLDCVVIIQKNYRAFLLRRRFLHL

SEQ ID NO: 1007 - protein, 101 aa, Ovis aries
WLLLCNPGLAELIAEKIGEDYVKDLSQLTKLNSFLGDDIFLREISNVKQENKLKFSQFLEKEYKVKINPSSMFDVQVKRIHEYKRQLLNCLHVVTMYNRIK

SEQ ID NO: 1008 - protein, 102 aa, Sus scrofa
LDTQKVAGTWHTVAMAVSDVSLLDAKSSPLKAYVEGLKPTPEGDLEILLQKRENDKCAQEVLLAKKTDIPAVFKINALDENQLFLLDTDYDSHLLLCMENSA

SEQ ID NO: 1009 - protein, 146 aa, Gallus gallus
MEMKKRLTLELRNKKPGEVKELVLDNCRSDDGKIVGLSSDFENLEFLSMINVNLLSISNLPKLNKLRKLELSDNRISGGLEVLAERTPNLTHLNLSGNKIKDINTLEPLKKLPNLHSLDLFNCEVTMLINYRESVFTLLPQLTYLD

SEQ ID NO: 1010 - protein, 147 aa, Gallus gallus
MEMKKRLTLELRNKKPGEVKELVLDNCRSDDGKIVGLSSDFENLEFLSMINVNLLSISNLPKLNKLRKLELSDNRISGGLEVLAERTPNLTHLNLSGNKIKDINTLEPLKKLPNLHSLDLFNCEVTMLINYRESVFTLLPQLTYLDG

SEQ ID NO: 1011 - protein, 148 aa, Gallus gallus
MEMKKRLTLELRNKKPGEVKELVLDNCRSDDGKIVGLSSDFENLEFLSMINVNLLSISNLPKLNKLRKLELSDNRISGGLEVLAERTPNLTHLNLSGNKIKDINTLEPLKKLPNLHSLDLFNCEVTMLINYRESVFTLLPQLTYLDGF

SEQ ID NO: 1012 - protein, 149 aa, Gallus gallus
MEMKKRLTLELRNKKPGEVKELVLDNCRSDDGKIVGLSSDFENLEFLSMINVNLLSISNLPKLNKLRKLELSDNRISGGLEVLAERTPNLTHLNLSGNKIKDINTLEPLKKLPNLHSLDLFNCEVTMLINYRESVFTLLPQLTYLDGFD

SEQ ID NO: 1013 - protein, 150 aa, Gallus gallus
MEMKKRLTLELRNKKPGEVKELVLDNCRSDDGKIVGLSSDFENLEFLSMINVNLLSISNLPKLNKLRKLELSDNRISGGLEVLAERTPNLTHLNLSGNKIKDINTLEPLKKLPNLHSLDLFNCEVTMLINYRESVFTLLPQLTYLDGFDA

SEQ ID NO: 1014 - protein, 151 aa, Gallus gallus
MEMKKRLTLELRNKKPGEVKELVLDNCRSDDGKIVGLSSDFENLEFLSMINVNLLSISNLPKLNKLRKLELSDNRISGGLEVLAERTPNLTHLNLSGNKIKDINTLEPLKKLPNLHSLDLFNCEVTMLINYRESVFTLLPQLTYLDGFDAD

SEQ ID NO: 1015 - protein, 152 aa, Gallus gallus
MEMKKRLTLELRNKKPGEVKELVLDNCRSDDGKIVGLSSDFENLEFLSMINVNLLSISNLPKLNKLRKLELSDNRISGGLEVLAERTPNLTHLNLSGNKIKDINTLEPLKKLPNLHSLDLFNCEVTMLINYRESVFTLLPQLTYLDGFDADE

SEQ ID NO: 1016 - protein, 153 aa, Gallus gallus
MEMKKRLTLELRNKKPGEVKELVLDNCRSDDGKIVGLSSDFENLEFLSMINVNLLSISNLPKLNKLRKLELSDNRISGGLEVLAERTPNLTHLNLSGNKIKDINTLEPLKKLPNLHSLDLFNCEVTMLINYRESVFTLLPQLTYLDGFDADEQ

SEQ ID NO: 1017 - protein, 154 aa, Gallus gallus
MEMKKRLTLELRNKKPGEVKELVLDNCRSDDGKIVGLSSDFENLEFLSMINVNLLSISNLPKLNKLRKLELSDNRISGGLEVLAERTPNLTHLNLSGNKIKDINTLEPLKKLPNLHSLDLFNCEVTMLINYRESVFTLLPQLTYLDGFDADEQE

SEQ ID NO: 1018 - protein, 161 aa, Gallus gallus
MEMKKRLTLELRNKKPGEVKELVLDNCRSDDGKIVGLSSDFENLEFLSMINVNLLSISNLPKLNKLRKLELSDNRISGGLEVLAERTPNLTHLNLSGNKIKDINTLEPLKKLPNLHSLDLFNCEVTMLINYRESVFTLLPQLTYLDGFDADEQEAPDSDPE

SEQ ID NO: 1019 - protein, 105 aa, Bos Taurus
YLKLRHWQWWRVFTKVKPLLQVTRQEEELQAKDEELLKVKEKQTKVEGELEEMERKHQQLLEEKNILAEQLQAETELFAEAEEMRARLAAKKQELEEILHDLESR

SEQ ID NO: 1020 - protein, 50 aa, Bos Taurus
LEEAKKKLLKDVEVLSQRLEEKALAYDKLEKTKTRLQQELDDLLVDLDHQ

SEQ ID NO: 1021 - protein, 50 aa, Bos Taurus
GTIENLEEAKKKLLKDVEVLSQRLEEKALAYDKLEKTKTRLQQELDDLLV

SEQ ID NO: 1022 - protein, 70 aa, Bos Taurus
QLQALQAQLTDTKKKVDDDLGTIENLEEAKKKLLKDVEVLSQRLEEKALAYDKLEKTKTRLQQELDDLLV

SEQ ID NO: 1023 - protein, 55 aa, Bos Taurus
KKLLKDVEVLSQRLEEKALAYDKLEKTKTRLQQELDDLLVDLDHQRQIVSNLEKK

SEQ ID NO: 1024 - protein, 65 aa, Bos Taurus
KKLLKDVEVLSQRLEEKALAYDKLEKTKTRLQQELDDLLVDLDHQRQIVSNLEKKQKKFDQLLAE

SEQ ID NO: 1025 - protein, 55 aa, Bos Taurus
GTIENLEEAKKKLLKDVEVLSQRLEEKALAYDKLEKTKTRLQQELDDLLVDLDHQ

SEQ ID NO: 1026 - protein, 50 aa, Bos Taurus
KKLLKDVEVLSQRLEEKALAYDKLEKTKTRLQQELDDLLVDLDHQRQIVS

SEQ ID NO: 1027 - protein, 65 aa, Bos Taurus
DTKKKVDDDLGTIENLEEAKKKLLKDVEVLSQRLEEKALAYDKLEKTKTRLQQELDDLLVDLDHQ

SEQ ID NO: 1028 - protein, 60 aa, Bos Taurus
LEEAKKKLLKDVEVLSQRLEEKALAYDKLEKTKTRLQQELDDLLVDLDHQRQIVSNLEKK

SEQ ID NO: 1029 - protein, 50 aa, Bos Taurus
EKALAYDKLEKTKTRLQQELDDLLVDLDHQRQIVSNLEKKQKKFDQLLAE

SEQ ID NO: 1030 - protein, 60 aa, Bos Taurus
DTKKKVDDDLGTIENLEEAKKKLLKDVEVLSQRLEEKALAYDKLEKTKTRLQQELDDLLV

SEQ ID NO: 1031 - protein, 100 aa, Bos Taurus
RSLEKQLQALQAQLTDTKKKVDDDLGTIENLEEAKKKLLKDVEVLSQRLEEKALAYDKLEKTKTRLQQELDDLLVDLDHQRQIVSNLEKKQKKFDQLLAE

SEQ ID NO: 1032 - protein, 100 aa, Bos Taurus
QLQALQAQLTDTKKKVDDDLGTIENLEEAKKKLLKDVEVLSQRLEEKALAYDKLEKTKTRLQQELDDLLVDLDHQRQIVSNLEKKQKKFDQLLAEEKNIS

SEQ ID NO: 1033 - protein, 100 aa, Bos Taurus
DTKKKVDDDLGTIENLEEAKKKLLKDVEVLSQRLEEKALAYDKLEKTKTRLQQELDDLLVDLDHQRQIVSNLEKKQKKFDQLLAEEKNISARYAEERDRA

SEQ ID NO: 1034 - protein, 112 aa, Bos Taurus
DTKKKVDDDLGTIENLEEAKKKLLKDVEVLSQRLEEKALAYDKLEKTKTRLQQELDDLLVDLDHQRQIVSNLEKKQKKFDQLLAEEKNISARYAEERDRAEAEAREKETKAL

SEQ ID NO: 1035 - protein, 51 aa, Bos Taurus
QNKELKAKLQELEGAVKSKFKATISALEAKIGQLEEQLEQEAKERAAANKL

SEQ ID NO: 1036 - protein, 99 aa, Bos Taurus
ELLNDRFRKTTLQVDTLNTELAAERSAAQKSDNARQQLERQNKELKAKLQELEGAVKSKFKATISALEAKIGQLEEQLEQEAKERAAANKLVRRTEKKL

SEQ ID NO: 1037 - protein, 65 aa, Bos Taurus
ALQEAHQQTLDDLQAEEDKVNTLTKAKTKLEQQVDDLEGSLEQEKKLRMDLERAKRKLEGDLKLA

SEQ ID NO: 1038 - protein, 50 aa, Bos Taurus
EEDKVNTLTKAKTKLEQQVDDLEGSLEQEKKLRMDLERAKRKLEGDLKLA

SEQ ID NO: 1039 - protein, 50 aa, Bos Taurus
LEQEKKLRMDLERAKRKLEGDLKLAQESTMDIENDKQQLDEKLKKKEFEM

SEQ ID NO: 1040 - protein, 50 aa, Bos Taurus
DLEGSLEQEKKLRMDLERAKRKLEGDLKLAQESTMDIENDKQQLDEKLKK

SEQ ID NO: 1041 - protein, 115 aa, Bos Taurus
SELKKDIDDLELTLAKVEKEKHATENKVKNLTEEMAGLDETIAKLTKEKKALQEAHQQTLDDLQAEEDKVNTLTKAKTKLEQQVDDLEGSLEQEKKLRMDLERAKRKLEGDLKLA

SEQ ID NO: 1042 - protein, 243 aa, Bos Taurus
ADAEERCDQLIKTKIQLEAKIKEVTERAEDEEEINAELTAKKRKLEDECSELKKDIDDLELTLAKVEKEKHATENKVKNLTEEMAGLDETIAKLTKEKKALQEAHQQTLDDLQAEEDKVNTLTKAKTKLEQQVDDLEGSLEQEKKLRMDLERAKRKLEGDLKLAQESTMDIENDKQQLDEKLKKKEFEMSNLQSKIEDEQALAMQLQKKIKELQARIEELEEEIEAERASRAKAEKQRSDLSR

SEQ ID NO: 1043 - protein, 270 aa, Bos Taurus
SEGDRLRVELAEKANKLQNELDNVSTLLEEAEKKGIKFAKDAAGLESQLQDTQELLQEETRQKLNLSSRIRQLEEERSSLQEQQEEEEEARRSLEKQLQALQAQLTDTKKKVDDDLGTIENLEEAKKKLLKDVEVLSQRLEEKALAYDKLEKTKTRLQQELDDLLVDLDHQRQIVSNLEKKQKKFDQLLAEEKNISARYAEERDRAEAEAREKETKALSLARALEEALEAREEAERQNKQLRADMEDLMSSKDDVGKNVHELEKSKRALE

SEQ ID NO: 1044 - protein, 53 aa, Arabidopsis thaliana
VRDTEFVHQITNVIKLRRAEPLRRSLKPYECKFKTDHLIWVLMKIKCDYRLVL

SEQ ID NO: 1045 - protein, 113 aa, Arabidopsis thaliana
KLEHGVHVVSGTPGRVCDMIKRRSLRTRAIKLLILDESDEMLSRGFKDQIYDVYRYLPPDLQVCLVSATLPHEILEMTSKFMTEPVKILVKRDELTLEGIKQFFVAVEKEEWK

SEQ ID NO: 1046 - protein, 73 aa, Saccharomyces cerevisiae
LVLGALLDTSHKFRNLDKDLCEKCAKCISMIGVLDVTKHEFKRTTYSENEVYDLNDSVQTIKFLIWVINDILV

SEQ ID NO: 1047 - protein, 90 aa, Saccharomyces cerevisiae
LVLGALLDTSHKFRNLDKDLCEKCAKCISMIGVLDVTKHEFKRTTYSENEVYDLNDSVQTIKFLIWVINDILVPAFWQSENPSKQLFVAL

SEQ ID NO: 1048 - protein, 70 aa, Saccharomyces cerevisiae
LVLGALLDTSHKFRNLDKDLCEKCAKCISMIGVLDVTKHEFKRTTYSENEVYDLNDSVQTIKFLIWVIND

SEQ ID NO: 1049 - protein, 75 aa, Saccharomyces cerevisiae
TLVLGALLDTSHKFRNLDKDLCEKCAKCISMIGVLDVTKHEFKRTTYSENEVYDLNDSVQTIKFLIWVINDILVP

SEQ ID NO: 1050 - protein, 76 aa, Saccharomyces cerevisiae
LVLGALLDTSHKFRNLDKDLCEKCAKCISMIGVLDVTKHEFKRTTYSENEVYDLNDSVQTIKFLIWVINDILVPAF

SEQ ID NO: 1051 - protein, 74 aa, Saccharomyces cerevisiae
ITLVLGALLDTSHKFRNLDKDLCEKCAKCISMIGVLDVTKHEFKRTTYSENEVYDLNDSVQTIKFLIWVINDIL

SEQ ID NO: 1052 - protein, 76 aa, Saccharomyces cerevisiae
SDITLVLGALLDTSHKFRNLDKDLCEKCAKCISMIGVLDVTKHEFKRTTYSENEVYDLNDSVQTIKFLIWVINDIL

SEQ ID NO: 1053 - protein, 386 aa, Gallus gallus
MGSIGAASMEFCFDVFKELKVHHANENIFYCPIAIMSALAMVYLGAKDSTRTQINKVVRFDKLPGFGDSIEAQCGTSVNVHSSLRDILNQITKPNDVYSFSLASRLYAEERYPILPEYLQCVKELYRGGLEPINFQTAADQARELINSWVESQTNGIIRNVLQPSSVDSQTAMVLVNAIVFKGLWEKAFKDEDTQAMPFRVTEQESKPVQMMYQIGLFRVASMASEKMKILELPFASGTMSMLVLLPDEVSGLEQLESIINFEKLTEWTSSNVMEERKIKVYLPRMKMEEKYNLTSVLMAMGITDVFSSSANLSGISSAESLKISQAVHAAHAEINEAGREVVGSAEAGVDAASVSEEFRADHPFLFCIKHIATNAVLFFGRCVSP

SEQ ID NO: 1054 - protein, 178 aa, Bos taurus
MKCLLLALALTCGAQALIVTQTMKGLDIQKVAGTWYSLAMAASDISLLDAQSAPLRVYVEELKPTPEGDLEILLQKWENGECAQKKIIAEKTKIPAVFKIDALNENKVLVLDTDYKKYLLFCMENSAEPEQSLACQCLVRTPEVDDEALEKFDKALKALPMHIRLSFNPTQLEEQCHI

SEQ ID NO: 1055 - protein, 147 aa, Saccharomyces cerevisiae
MSSNLTEEQIAEFKEAFALFDKDNNGSISSSELATVMRSLGLSPSEAEVNDLMNEIDVDGNHQIEFSEFLALMSRQLKSNDSEQELLEAFKVFDKNGDGLISAAELKHVLTSIGEKLTDAEVDDMLREVSDGSGEINIQQFAALLSK

SEQ ID NO: 1056 - protein, 20 aa, Artificial Sequence
  Description of Artificial Sequence: Synthetic peptide
MGSSHHHHHHSSGLVPRGSH

SEQ ID NO: 1057 - protein, 11 aa, Artificial Sequence
  Description of Artificial Sequence: Synthetic peptide
MGSHHHHHHHH

SEQ ID NO: 1058 - protein, 4 aa, Saccharomyces cerevisiae
LALA

SEQ ID NO: 1059 - protein, 4 aa, Saccharomyces cerevisiae
LLLD

SEQ ID NO: 1060 - protein, 4 aa, Saccharomyces cerevisiae
PSEA

SEQ ID NO: 1061 - protein, 4 aa, Saccharomyces cerevisiae
IAEF

SEQ ID NO: 1062 - protein, 4 aa, Saccharomyces cerevisiae
IQQF

SEQ ID NO: 1063 - protein, 4 aa, Saccharomyces cerevisiae
YDKL

SEQ ID NO: 1064 - protein, 4 aa, Saccharomyces cerevisiae
AEFK

SEQ ID NO: 1065 - protein, 5 aa, Saccharomyces cerevisiae
SNLTE

SEQ ID NO: 1066 - protein, 4 aa, Saccharomyces cerevisiae
LKHV

SEQ ID NO: 1067 - protein, 5 aa, Saccharomyces cerevisiae
ELLEA

SEQ ID NO: 1068 - protein, 5 aa, Saccharomyces cerevisiae
SSSEL

SEQ ID NO: 1069 - protein, 5 aa, Saccharomyces cerevisiae
EELAL

SEQ ID NO: 1070 - protein, 4 aa, Saccharomyces cerevisiae
FKVF

SEQ ID NO: 1071 - protein, 5 aa, Saccharomyces cerevisiae
DDLLL

SEQ ID NO: 1072 - protein, 5 aa, Saccharomyces cerevisiae
AELKH

SEQ ID NO: 1073 - protein, 5 aa, Saccharomyces cerevisiae
LAYDK

SEQ ID NO: 1074 - protein, 5 aa, Saccharomyces cerevisiae
LKHVL

SEQ ID NO: 1075 - protein, 5 aa, Saccharomyces cerevisiae
TKTRL

SEQ ID NO: 1076 - protein, 5 aa, Saccharomyces cerevisiae
FKEAF

SEQ ID NO: 1077 - protein, 5 aa, Saccharomyces cerevisiae
DLDHQ

SEQ ID NO: 1078 - protein, 7 aa, Saccharomyces cerevisiae
NGSISSS

SEQ ID NO: 1079 - protein, 6 aa, Saccharomyces cerevisiae
GTLENL

SEQ ID NO: 1080 - protein, 7 aa, Saccharomyces cerevisiae
SLGLSPS

SEQ ID NO: 1081 - protein, 6 aa, Saccharomyces cerevisiae
EKLTDA

SEQ ID NO: 1082 - protein, 6 aa, Saccharomyces cerevisiae
GEKLTD

SEQ ID NO: 1083 - protein, 6 aa, Saccharomyces cerevisiae
AEVDDM

SEQ ID NO: 1084 - protein, 6 aa, Saccharomyces cerevisiae
ELATVM

SEQ ID NO: 1085 - protein, 6 aa, Saccharomyces cerevisiae
LDDLLL

SEQ ID NO: 1086 - protein, 7 aa, Saccharomyces cerevisiae
GSGEINI

SEQ ID NO: 1087 - protein, 6 aa, Saccharomyces cerevisiae
LDLDHQ

SEQ ID NO: 1088 - protein, 7 aa, Saccharomyces cerevisiae
RSLGLSP

SEQ ID NO: 1089 - protein, 6 aa, Saccharomyces cerevisiae
DLKKKL

SEQ ID NO: 1090 - protein, 6 aa, Saccharomyces cerevisiae
ELKHVL

SEQ ID NO: 1091 - protein, 6 aa, Saccharomyces cerevisiae
KTKTRL

SEQ ID NO: 1092 - protein, 7 aa, Saccharomyces cerevisiae
KLTDAEV

SEQ ID NO: 1093 - protein, 6 aa, Saccharomyces cerevisiae
SQRLEE

SEQ ID NO: 1094 - protein, 6 aa, Saccharomyces cerevisiae
FKVFDK

SEQ ID NO: 1095 - protein, 7 aa, Saccharomyces cerevisiae
AEVDDML

SEQ ID NO: 1096 - protein, 7 aa, Saccharomyces cerevisiae
AEVDDML

SEQ ID NO: 1097 - protein, 7 aa, Saccharomyces cerevisiae
QQELDDL

SEQ ID NO: 1098 - protein, 7 aa, Saccharomyces cerevisiae
DAEVDDM

SEQ ID NO: 1099 - protein, 7 aa, Saccharomyces cerevisiae
LEKTKTR

SEQ ID NO: 1100 - protein, 7 aa, Saccharomyces cerevisiae
AELKHVL

SEQ ID NO: 1101 - protein, 7 aa, Saccharomyces cerevisiae
LEKTKTR

SEQ ID NO: 1102 - protein, 8 aa, Saccharomyces cerevisiae
HVLTSIGE

SEQ ID NO: 1103 - protein, 8 aa, Saccharomyces cerevisiae
GTLENLEE

SEQ ID NO: 1104 - protein, 8 aa, Saccharomyces cerevisiae
SIGEKLTD

SEQ ID NO: 1105 - protein, 8 aa, Saccharomyces cerevisiae
QQELDDLL

SEQ ID NO: 1106 - protein, 9 aa, Saccharomyces cerevisiae
RSLGLSPSE

SEQ ID NO: 1107 - protein, 10 aa, Saccharomyces cerevisiae
KLEKTKTRLQ

SEQ ID NO: 1108 - protein, 9 aa, Saccharomyces cerevisiae
VLTSIGEKL

SEQ ID NO: 1109 - protein, 11 aa, Saccharomyces cerevisiae
SRQLKSNDSEQ

SEQ ID NO: 1110 - protein, 9 aa, Saccharomyces cerevisiae
TSIGEKLTD

SEQ ID NO: 1111 - protein, 11 aa, Saccharomyces cerevisiae
EKTKTRLQQEL

SEQ ID NO: 1112 - protein, 9 aa, Saccharomyces cerevisiae
HVLTSIGEK

SEQ ID NO: 1113 - protein, 11 aa, Saccharomyces cerevisiae
YDKLEKTKTRL

SEQ ID NO: 1114 - protein, 9 aa, Saccharomyces cerevisiae
AELKHVLTS

SEQ ID NO: 1115 - protein, 13 aa, Saccharomyces cerevisiae
LAYDKLEKTKTRL

SEQ ID NO: 1116 - protein, 10 aa, Saccharomyces cerevisiae
RSLGLSPSEA

SEQ ID NO: 1117 - protein, 13 aa, Saccharomyces cerevisiae
EELKKKLLKDLEL

SEQ ID NO: 1118 - protein, 10 aa, Saccharomyces cerevisiae
SSNLTEEQIA

SEQ ID NO: 1119 - protein, 14 aa, Saccharomyces cerevisiae
EELKKKLLKDLELL

SEQ ID NO: 1120 - protein, 11 aa, Saccharomyces cerevisiae
RSLGLSPSEAE

SEQ ID NO: 1121 - protein, 16 aa, Saccharomyces cerevisiae
AELKHVLTSIGEKLTD

SEQ ID NO: 1122 - protein, 13 aa, Saccharomyces cerevisiae
KVFDKNGDGLISA

SEQ ID NO: 1123 - protein, 15 aa, Saccharomyces cerevisiae
MGSHHHHHHHHSSNL

SEQ ID NO: 1124 - protein, 14 aa, Saccharomyces cerevisiae
FDKDNNGSISSSEL

SEQ ID NO: 1125 - protein, 16 aa, Saccharomyces cerevisiae
LREVSDGSGEINIQQF

SEQ ID NO: 1126 - protein, 14 aa, Saccharomyces cerevisiae
REVSDGSGEINIQQ

SEQ ID NO: 1127 - protein, 17 aa, Saccharomyces cerevisiae
AAELKHVLTSIGEKLTD

SEQ ID NO: 1128 - protein, 13 aa, Saccharomyces cerevisiae
DVDGNHQIEFSEF

SEQ ID NO: 1129 - protein, 18 aa, Saccharomyces cerevisiae
AELKHVLTSIGEKLTDAE

SEQ ID NO: 1130 - protein, 15 aa, Saccharomyces cerevisiae
LREVSDGSGEINIQQ

SEQ ID NO: 1131 - protein, 16 aa, Saccharomyces cerevisiae
AYDKLEKTKTRLQQEL

SEQ ID NO: 1132 - protein, 15 aa, Saccharomyces cerevisiae
REVSDGSGEINIQQF

SEQ ID NO: 1133 - protein, 19 aa, Saccharomyces cerevisiae
AAELKHVLTSIGEKLTDAE

SEQ ID NO: 1134 - protein, 21 aa, Saccharomyces cerevisiae
LREVSDGSGEINIQQFAALLS

SEQ ID NO: 1135 - protein, 17 aa, Saccharomyces cerevisiae
LENLEELKKKLLKDLEL

SEQ ID NO: 1136 - protein, 17 aa, Saccharomyces cerevisiae
KLEKTKTRLQQELDDLL

SEQ ID NO: 1137 - protein, 18 aa, Saccharomyces cerevisiae
DKLEKTKTRLQQELDDLL

SEQ ID NO: 1138 - protein, 20 aa, Saccharomyces cerevisiae
LAYDKLEKTKTRLQQELDDL

SEQ ID NO: 1139 - protein, 22 aa, Saccharomyces cerevisiae
LALAYDKLEKTKTRLQQELDDL

SEQ ID NO: 1140 - protein, 4 aa, Saccharomyces cerevisiae
INDI

SEQ ID NO: 1141 - protein, 4 aa, Saccharomyces cerevisiae
HLVL

SEQ ID NO: 1142 - protein, 4 aa, Saccharomyces cerevisiae
IGVL

SEQ ID NO: 1143 - protein, 4 aa, Saccharomyces cerevisiae
TIKF

SEQ ID NO: 1144 - protein, 4 aa, Saccharomyces cerevisiae
TIKF

SEQ ID NO: 1145 - protein, 5 aa, Saccharomyces cerevisiae
IGVLD

SEQ ID NO: 1146 - protein, 4 aa, Saccharomyces cerevisiae
TIKF

SEQ ID NO: 1147 - protein, 4 aa, Saccharomyces cerevisiae
RNLD

SEQ ID NO: 1148 - protein, 5 aa, Saccharomyces cerevisiae
EVYDL

SEQ ID NO: 1149 - protein, 6 aa, Saccharomyces cerevisiae
IGVLDV

SEQ ID NO: 1150 - protein, 6 aa, Saccharomyces cerevisiae
LNDSVQ

SEQ ID NO: 1151 - protein, 5 aa, Saccharomyces cerevisiae
QTIKF

SEQ ID NO: 1152 - protein, 6 aa, Saccharomyces cerevisiae
IWVIND

SEQ ID NO: 1153 - protein, 6 aa, Saccharomyces cerevisiae
VQTIKF

SEQ ID NO: 1154 - protein, 7 aa, Saccharomyces cerevisiae
DLNDSVQ

SEQ ID NO: 1155 - protein, 7 aa, Saccharomyces cerevisiae
SVQTIKF

SEQ ID NO: 1156 - protein, 7 aa, Saccharomyces cerevisiae
SVQTIKF

SEQ ID NO: 1157 - protein, 12 aa, Saccharomyces cerevisiae
KCAKCISMIGVL

SEQ ID NO: 1158 - protein, 10 aa, Saccharomyces cerevisiae
HHLVLGALLD

SEQ ID NO: 1159 - protein, 12 aa, Saccharomyces cerevisiae
EKCAKCISMIGV

SEQ ID NO: 1160 - protein, 9 aa, Saccharomyces cerevisiae
HHHHHHLVL

SEQ ID NO: 1161 - protein, 10 aa, Saccharomyces cerevisiae
HEFKRTTYSE

SEQ ID NO: 1162 - protein, 11 aa, Saccharomyces cerevisiae
HHHHHHHHLVL

SEQ ID NO: 1163 - protein, 11 aa, Saccharomyces cerevisiae
SHKFRNLDKDL

SEQ ID NO: 1164 - protein, 12 aa, Saccharomyces cerevisiae
DVTKHEFKRTTY

SEQ ID NO: 1165 - protein, 13 aa, Saccharomyces cerevisiae
ISMIGVLDVTKHE

SEQ ID NO: 1166 - protein, 12 aa, Saccharomyces cerevisiae
SHHHHHHHHLVL

SEQ ID NO: 1167 - protein, 13 aa, Saccharomyces cerevisiae
TKHEFKRTTYSEN

SEQ ID NO: 1168 - protein, 14 aa, Saccharomyces cerevisiae
GSHHHHHHHHLVLG

SEQ ID NO: 1169 - protein, 14 aa, Saccharomyces cerevisiae
MGSHHHHHHHHLVL

SEQ ID NO: 1170 - protein, 14 aa, Saccharomyces cerevisiae
KRTTYSENEVYDLN
